(19) United States
(12) Patent Application Publication
(10) Pub. No.: US 2023/0374470 A1
(43) Pub. Date: Nov. 23, 2023

(54) ENGINEERED GALACTOSE OXIDASE VARIANT ENZYMES

(71) Applicant: Codexis, Inc., Redwood City, CA (US)

(72) Inventors: Margie Tabuga Borra-Garske, Palo Alto, CA (US); Jovana Nazor, Milpitas, CA (US); Nandhitha Subramanian, Cambridge (GB); Oscar Alvizo, Fremont, CA (US); Anna Fryszkowska, New York, NY (US)

(21) Appl. No.: 18/247,863

(22) PCT Filed: Oct. 1, 2021
(86) PCT No.: PCT/US2021/053183

§ 371 Date: Apr. 4, 2023

Related U.S. Application Data
(60) Provisional application No. 63/087,971, filed on Oct. 6, 2020.

(51) Int. Cl. C12N 9/04; C12N 15/70

(52) U.S. Cl. CPC C12N 9/0006; C12N 15/70; C12Y 101/03009

(57) ABSTRACT

The present invention provides engineered galactose oxidase (GOase) enzymes, polypeptides having GOase activity, and polynucleotides encoding these enzymes, as well as vectors and host cells comprising these polynucleotides and polypeptides. Methods for producing GOase enzymes are also provided. The present invention further provides compositions comprising the GOase enzymes and methods of using the engineered GOase enzymes. The present invention finds particular use in the production of pharmaceutical and other compounds.

[0001] The present application claims priority to U.S. Prov. Pat. Appln. Ser. No. 63/087,971, filed Oct. 6, 2020, which is incorporated by reference in its entirety, for all purposes.

### FIELD OF THE INVENTION

[0002] The present invention provides engineered galactose oxidase (GOase) enzymes, polypeptides having GOase activity, and polynucleotides encoding these enzymes, as well as vectors and host cells comprising these polynucleotides and polypeptides. Methods for producing GOase enzymes are also provided. The present invention further provides compositions comprising the GOase enzymes and methods of using the engineered GOase enzymes. The present invention finds particular use in the production of pharmaceutical and other compounds.

### REFERENCE TO SEQUENCE LISTING, TABLE OR COMPUTER PROGRAM

[0003] The official copy of the Sequence Listing is submitted concurrently with the specification as an ASCII formatted text file via EFS-Web, with a file name of “CX2-208WO1_ST25.txt”, a creation date of Sep. 30, 2021 and a size of 1.26 MB. The Sequence Listing filed via EFS-Web is part of the specification and incorporated in its entirety by reference herein.

### BACKGROUND OF THE INVENTION

[0004] Oxidation of alcohols to aldehydes is a key transformation required in synthetic organic chemistry. There are several chemical reagents capable of performing this type of reaction; however, there are several drawbacks associated with the use of these methods. Chemical oxidation routes are non-chemoselective methods, that when used, require the protection of non-targeted reactive groups.

[0005] These methods of oxidation are difficult to control in terms of oxidation state, as some chemical reagents are capable of over-oxidizing the target alcohol. In addition, reactions run under oxidizing conditions present hazardous conditions that can result in explosions and severe physical harm to personnel and property. Oxidizing reagents are reactive species that are harmful to the environment, as well as their byproducts. Thus, there remains a need in the art to produce controlled agents capable of performing selective oxidation chemistry, while reducing or eliminating these severe drawbacks.

### SUMMARY OF THE INVENTION

[0006] The present invention provides engineered galactose oxidase (GOase) enzymes, polypeptides having mild oxidative activity on primary alcohols resulting in the corresponding aldehyde, in an enantioselective manner, and polynucleotides encoding these enzymes, as well as vectors and host cells comprising these polynucleotides and polypeptides. Methods for producing GOase enzymes are also provided. The present invention further provides compositions comprising the GOase enzymes and methods of using the engineered GOase enzymes. The present invention finds particular use in the production of pharmaceutical and other compounds.

[0007] The present invention provides engineered galactose oxidases comprising polypeptide sequences having at least 85%, 86%, 87%, 88%, 89%, 90%, 91%, 92%, 93%, 94%, 95%, 96%, 97%, 98%, 99%, or more sequence identity to SEQ ID NO: 4, 6, 38, 50, 114, 226, and/or 262, or a functional fragment thereof. In some embodiments, the engineered galactose oxidase comprises at least one substitution or substitution set in the polypeptide sequence, and wherein the amino acid positions of the polypeptide sequence are numbered with reference to SEQ ID NO: 4, 6, 38, 50, 114, 226, and/or 262. In some additional embodiments of the engineered galactose oxidases the polypeptide sequences have at least 85%, 86%, 87%, 88%, 89%, 90%, 91%, 92%, 93%, 94%, 95%, 96%, 97%, 98%, 99%, or more sequence identity to SEQ ID NO:4. In some embodiments, the engineered galactose oxidase comprises at least one substitution or substitution set at one or more positions in the polypeptide sequence selected from 19/547/564, 47, 111, 196, 196/327, 196/408/462, 196/442, 196/442/462/583, 218, 292, 329, 407, 408, and 442, wherein the amino acid positions of the polypeptide sequence are numbered with reference to SEQ ID NO: 4. In some embodiments, the engineered galactose oxidase comprises at least one substitution or substitution set selected from 19F/547N/564G, 47T, 111E, 196Q, 196R, 196R/327L, 196R/408N/462A, 196R/442Y, 196R/442Y/462A/583S, 218T, 218V, 292R, 329W, 407G, 408N, and 442Y, wherein the amino acid positions of the polypeptide sequence are numbered with reference to SEQ ID NO: 4. In some additional embodiments, the engineered galactose oxidase comprises at least one substitution or substitution set selected from C19F/I547N/W564G, N47T, T111E, E196Q, E196R, E196R/R327L, E196R/D408N/G462A, E196R/F442Y, E196R/F442Y/G462A/T583S, R218T, R218V, S292R, L329W, Q407G, D408N, and F442Y, wherein the amino acid positions of the polypeptide sequence are numbered with reference to SEQ ID NO: 4.

[0008] In some additional embodiments, the engineered galactose oxidase comprises a polypeptide sequence having at least 85%, 86%, 87%, 88%, 89%, 90%, 91%, 92%, 93%, 94%, 95%, 96%, 97%, 98%, 99%, or more sequence identity to SEQ ID NO: 6, and wherein the engineered galactose oxidase comprises at least one substitution or substitution set at one or more positions in the polypeptide sequence selected from 291, 407, 437, and 437/486, wherein the amino acid positions of the polypeptide sequence are numbered with reference to SEQ ID NO: 6. In some embodiments, the engineered galactose oxidase comprises at least one substitution or substitution set selected from 291F, 407E, 407S, 437N, and 437N/486V, wherein the amino acid positions of the polypeptide sequence are numbered with reference to SEQ ID NO: 6. In some embodiments, the engineered galactose oxidase comprises at least one substitution or substitution set selected from Y291F, Q407E, Q407S, L437N, and L437N/K486V, wherein the amino acid positions of the polypeptide sequence are numbered with reference to SEQ ID NO: 6.

[0009] In some further embodiments, the engineered galactose oxidase comprises a polypeptide sequence that has at least 85%, 86%, 87%, 88%, 89%, 90%, 91%, 92%, 93%, 94%, 95%, 96%, 97%, 98%, 99%, or more sequence identity to SEQ ID NO: 38, and wherein the engineered galactose oxidase comprises at least one substitution or substitution set at one or more positions in the polypeptide sequence selected from 8/29/192/196/274/295, 8/63/224/274/291/295/296, 8/173/192/224/291/295/296, 8/274/291/295, 29/56/192/197/219/224/291/295/296, 43/192/274/291/296, 56/274/291, 56/274/295, 63/173/192/274, 63/192/295, 63/291/295, 111/462, 173/291, 197/220/426, 220/295, 220/375/426, 220/426/567, 243/274/291/295/637, 291, 291/408/437, 291/408/462, 291/429, 291/437, 291/437/462, 291/462, 297/462, 408/462, 437/462, 438, and 462, wherein the amino acid positions of the polypeptide sequence are numbered with reference to SEQ ID NO: 38. In some embodiments, the engineered galactose oxidase comprises at least one substitution or substitution set selected from 8S/29N/192N/196E/274Q/295V, 8S/63T/224K/274Q/291F/295V/296F, 8S/173A/192N/224K/291F/295V/296F, 8S/274Q/291F/295V, 29N/56Y/192N/197R/219V/224K/291F/295V/296F, 43F/192N/274Q/291F/296F, 56Y/274Q/291F, 56Y/274Q/295V, 63T/173A/192N/274Q, 63T/192N/295V, 63T/291F/295V, 111S/462A, 173A/291F, 197G/220V/426L, 220V/295R, 220V/375N/426L, 220V/426L/567S, 243T/274Q/291F/295V/637R, 291F, 291F/408N/437N, 291F/408N/462A, 291F/429I, 291F/437N, 291F/437N/462A, 291F/462A, 297L/462A, 408N/462A, 437N/462A, 438A, and 462A, wherein the amino acid positions of the polypeptide sequence are numbered with reference to SEQ ID NO: 38. In some embodiments, the engineered galactose oxidase comprises at least one substitution or substitution set selected from V8S/I29N/Q192N/R196E/N274Q/Q295V, V8S/V63T/G224K/N274Q/Y291F/Q295V/V296F, V8S/S173A/Q192N/G224K/Y291F/Q295V/V296F, V8S/N274Q/Y291F/Q295V, I29N/I56Y/Q192N/D197R/T219V/G224K/Y291F/Q295V/V296F, Q43F/Q192N/N274Q/Y291F/V296F, I56Y/N274Q/Y291F, I56Y/N274Q/Q295V, V63T/S173A/Q192N/N274Q, V63T/Q192N/Q295V, V63T/Y291F/Q295V, T111S/G462A, S173A/Y291F, D197G/S220V/S426L, S220V/Q295R, S220V/D375N/S426L, S220V/S426L/M567S, S243T/N274Q/Y291F/Q295V/N637R, Y291F, Y291F/D408N/L437N, Y291F/D408N/G462A, Y291F/T429I, Y291F/L437N, Y291F/L437N/G462A, Y291F/G462A, E297L/G462A, D408N/G462A, L437N/G462A, F438A, and G462A, wherein the amino acid positions of the polypeptide sequence are numbered with reference to SEQ ID NO: 38.

[0010] In yet some further embodiments, the engineered galactose oxidase comprises a polypeptide sequence having at least 85%, 86%, 87%, 88%, 89%, 90%, 91%, 92%, 93%, 94%, 95%, 96%, 97%, 98%, 99%, or more sequence identity to SEQ ID NO:50, and wherein the engineered galactose oxidase comprises at least one substitution or substitution set at one or more positions in the polypeptide sequence selected from 24/52/311/550, 46/158/192/217/297/556, 46/158/192/367/375/556, 46/192, 46/192/217/274/556, 46/192/274/304/367/637, 46/192/274/437/556, 46/192/304/367, 46/192/367/408, 46/192/367/556, 46/192/375/437, 46/274/367/375/437/637, 46/297/304/367/437/637, 158/192/217/556, 158/192/274/304, 158/192/274/437/556, 158/192/274/556, 158/192/304/408/556/637, 158/192/367/375, 158/192/367/556, 158/192/408/556, 158/637, 192, 192/217/295/297/367/556, 192/217/367/375/556, 192/217/556, 192/274, 192/274/304/426, 192/274/367/556, 192/274/367/637, 192/274/375, 192/295, 192/295/304, 192/295/367/375, 192/297/367/644, 192/297/437, 192/304, 192/304/365/437, 192/304/367, 192/304/637, 192/367, 192/367/375/556, 192/367/408/426/437/556, 192/437/556, 192/637, 217/304/437, 274/304/367/426/556, 304/426/556, 311/343/550, 367, 367/556, 375, 426, 437, and 550, wherein the amino acid positions of the polypeptide sequence are numbered with reference to SEQ ID NO: 50. In some embodiments, the engineered galactose oxidase comprises at least one substitution or substitution set selected from 24E/52L/311A/550V, 46A/158E/192N/217E/297L/556K, 46A/158E/192N/367L/375N/556K, 46A/192N, 46A/192N/217E/274Q/556K, 46A/192N/304E/367L, 46A/192N/367L/556K, 46A/274Q/367L/375N/437N/637R, 46A/297L/304E/367L/437N/637R, 46T/192N, 46T/192N/274Q/304E/367L/637R, 46T/192N/274Q/437N/556K, 46T/192N/274Q/437Y/556K, 46T/192N/367L/408N, 46T/192N/375N/437N, 158E/192N/217E/556K, 158E/192N/274Q/304E, 158E/192N/274Q/437N/556K, 158E/192N/274Q/556K, 158E/192N/304E/408N/556K/637R, 158E/192N/367L/375N, 158E/192N/367L/556K, 158E/192N/408N/556K, 158E/637R, 192N, 192N/217E/295V/297L/367L/556K, 192N/217E/367L/375N/556K, 192N/217E/556K, 192N/274Q, 192N/274Q/304E/426L, 192N/274Q/367L/556K, 192N/274Q/367L/637R, 192N/274Q/375N, 192N/295V, 192N/295V/304E, 192N/295V/367L/375N, 192N/297L/367L/644S, 192N/297L/437N, 192N/304E, 192N/304E/365G/437N, 192N/304E/367L, 192N/304E/637R, 192N/367L, 192N/367L/375N/556K, 192N/367L/408N/426L/437Y/556K, 192N/437N/556K, 192N/637R, 217E/304E/437N, 274Q/304E/367L/426L/556K, 304E/426L/556K, 311A/343E/550L, 367L, 367L/556K, 375N, 426L, 437Y, and 550L, wherein the amino acid positions of the polypeptide sequence are numbered with reference to SEQ ID NO: 50. In some embodiments, the engineered galactose oxidase comprises at least one substitution or substitution set selected from S24E/P52L/T311A/T550V, V46A/G158E/Q192N/D217E/E297L/V556K, V46A/G158E/Q192N/K367L/D375N/V556K, V46A/Q192N, V46A/Q192N/D217E/N274Q/V556K, V46A/Q192N/S304E/K367L, V46A/Q192N/K367L/V556K, V46A/N274Q/K367L/D375N/L437N/N637R, V46A/E297L/S304E/K367L/L437N/N637R, V46T/Q192N, V46T/Q192N/N274Q/S304E/K367L/N637R, V46T/Q192N/N274Q/L437N/V556K, V46T/Q192N/N274Q/L437Y/V556K, V46T/Q192N/K367L/D408N, V46T/Q192N/D375N/L437N, G158E/Q192N/D217E/V556K, G158E/Q192N/N274Q/S304E, G158E/Q192N/N274Q/L437N/V556K, G158E/Q192N/N274Q/V556K, G158E/Q192N/S304E/D408N/V556K/N637R, G158E/Q192N/K367L/D375N, G158E/Q192N/K367L/V556K, G158E/Q192N/D408N/V556K, G158E/N637R, Q192N, Q192N/D217E/Q295V/E297L/K367L/V556K, Q192N/D217E/K367L/D375N/V556K, Q192N/D217E/V556K, Q192N/N274Q, Q192N/N274Q/S304E/S426L, Q192N/N274Q/K367L/V556K, Q192N/N274Q/K367L/N637R, Q192N/N274Q/D375N, Q192N/Q295V, Q192N/Q295V/S304E, Q192N/Q295V/K367L/D375N, Q192N/E297L/K367L/G644S, Q192N/E297L/L437N, Q192N/S304E, Q192N/S304E/D365G/L437N, Q192N/S304E/K367L, Q192N/S304E/N637R, Q192N/K367L, Q192N/K367L/D375N/V556K, Q192N/K367L/D408N/S426L/L437Y/V556K, Q192N/L437N/V556K, Q192N/N637R, D217E/S304E/L437N, N274Q/S304E/K367L/S426L/V556K, S304E/S426L/V556K, T311A/K343E/T550L, K367L, K367L/V556K, D375N, S426L, L437Y, and T550L, wherein the amino acid positions of the polypeptide sequence are numbered with reference to SEQ ID NO: 50.

[0011] In some embodiments, the engineered galactose oxidase comprises a polypeptide sequence that has at least 85%, 86%, 87%, 88%, 89%, 90%, 91%, 92%, 93%, 94%, 95%, 96%, 97%, 98%, 99%, or more sequence identity to SEQ ID NO: 114, and wherein the engineered galactose oxidase comprises at least one substitution or substitution set at one or more positions in the polypeptide sequence selected from 161/564, 221, 263, 296, 308, 361, 373, 481/597, 518, 537, 553, 564, 570, and 596, wherein the amino acid positions of the polypeptide sequence are numbered with reference to SEQ ID NO: 114. In some embodiments, the engineered galactose oxidase comprises at least one substitution or substitution set selected from 161C/564S, 221E, 221S, 263E, 263V, 296A, 308G, 361T, 373R, 481R/597S, 518T, 537V, 553S, 553T, 564R, 570R, 596R, and 596V, wherein the amino acid positions of the polypeptide sequence are numbered with reference to SEQ ID NO: 114. In some embodiments, the engineered galactose oxidase comprises at least one substitution or substitution set selected from R161C/W564S, T221E, T221S, P263E, P263V, V296A, K308G, S361T, Q373R, Q481R/N597S, D518T, S537V, Q553S, Q553T, W564R, S570R, T596R, and T596V, wherein the amino acid positions of the polypeptide sequence are numbered with reference to SEQ ID NO: 114.

[0012] In some additional embodiments, the engineered galactose oxidase comprises a polypeptide sequence having at least 85%, 86%, 87%, 88%, 89%, 90%, 91%, 92%, 93%, 94%, 95%, 96%, 97%, 98%, 99%, or more sequence identity to SEQ ID NO: 226, and wherein the engineered galactose oxidase comprises at least one substitution or substitution set at one or more positions in the polypeptide sequence selected from 24/47/382/408/570, 24/79/308/367, 24/250/308/596, 24/250/408/568/570, 24/308/309, 24/309/408/570, 24/367/408/596, 24/367/570, 24/596, 69, 250, 250/570, 309, 443, and 570, wherein the amino acid positions of the polypeptide sequence are numbered with reference to SEQ ID NO: 226. In some embodiments, the engineered galactose oxidase comprises at least one substitution or substitution set selected from 24D/47G/382S/408E/570T, 24D/79T/308G/367L, 24D/250V/308G/596V, 24D/250V/408E/568Q/570T, 24D/308G/309M, 24D/309M/408E/570T, 24D/367L/408E/596V, 24D/367L/570T, 24D/596V, 69I, 250V, 250V/570T, 309M, 443S, and 570T, wherein the amino acid positions of the polypeptide sequence are numbered with reference to SEQ ID NO: 226. In some embodiments, the engineered galactose oxidase comprises at least one substitution or substitution set selected from S24D/N47G/A382S/D408E/S570T, S24D/Q79T/K308G/K367L, S24D/K250V/K308G/T596V, S24D/K250V/D408E/S568Q/S570T, S24D/K308G/T309M, S24D/T309M/D408E/S570T, S24D/K367L/D408E/T596V, S24D/K367L/S570T, S24D/T596V, L69I, K250V, K250V/S570T, T309M, H443S, and S570T, wherein the amino acid positions of the polypeptide sequence are numbered with reference to SEQ ID NO: 226.

[0013] In some embodiments, the engineered galactose oxidase comprises a polypeptide sequence having at least 85%, 86%, 87%, 88%, 89%, 90%, 91%, 92%, 93%, 94%, 95%, 96%, 97%, 98%, 99%, or more sequence identity to SEQ ID NO: 262, and wherein the engineered galactose oxidase comprises at least one substitution or substitution set at one or more positions in the polypeptide sequence selected from 239/408, 318, 335/408, 338, and 408, wherein the amino acid positions of the polypeptide sequence are numbered with reference to SEQ ID NO: 262. In some embodiments, the engineered galactose oxidase comprises at least one substitution or substitution set selected from 239M/408D, 318I, 335P/408D, 338A, and 408D, wherein the amino acid positions of the polypeptide sequence are numbered with reference to SEQ ID NO: 262. In some embodiments, the engineered galactose oxidase comprises at least one substitution or substitution set selected from Q239M/E408D, V318I, H335P/E408D, L338A, and E408D, wherein the amino acid positions of the polypeptide sequence are numbered with reference to SEQ ID NO: 262.

[0014] In some additional embodiments, the engineered galactose oxidase comprises a polypeptide sequence having at least 85%, 86%, 87%, 88%, 89%, 90%, 91%, 92%, 93%, 94%, 95%, 96%, 97%, 98%, 99%, or more sequence identity to SEQ ID NO: 262, and wherein the engineered galactose oxidase comprises at least one substitution or substitution set at one or more positions in the polypeptide sequence selected from 335/408, 338, and 408, wherein the amino acid positions of the polypeptide sequence are numbered with reference to SEQ ID NO: 262. In some embodiments, the engineered galactose oxidase comprises at least one substitution or substitution set selected from 335P/408D, 338A, and 408D, wherein the amino acid positions of the polypeptide sequence are numbered with reference to SEQ ID NO: 262. In some embodiments, the engineered galactose oxidase comprises at least one substitution or substitution set selected from H335P/E408D, L338A, and E408D, wherein the amino acid positions of the polypeptide sequence are numbered with reference to SEQ ID NO: 262.

[0015] In some additional embodiments, the engineered galactose oxidase comprises a polypeptide sequence having at least 85%, 86%, 87%, 88%, 89%, 90%, 91%, 92%, 93%, 94%, 95%, 96%, 97%, 98%, 99%, or more sequence identity to SEQ ID NO: 262, and wherein the engineered galactose oxidase comprises at least one substitution or substitution set at one or more positions in the polypeptide sequence selected from 28/239, 28/239/274/408, 28/239/291/408, 28/239/371/408, 28/371, 239, 239/274/291/359/513, 239/274/291/408, 239/291/408, 239/408, 239/408/523, 291, 291/408, 318, 335/408, 338, and 408, wherein the amino acid positions of the polypeptide sequence are numbered with reference to SEQ ID NO: 262. In some embodiments, the engineered galactose oxidase comprises at least one substitution or substitution set selected from 28G/239M, 28G/239M/274N/408D, 28G/239M/291Y/408D, 28G/239M/371I/408D, 28G/371I, 239L/274H/291Y/408D, 239L/408D, 239M, 239M/274N/291Y/359F/513R, 239M/291Y/408D, 239M/408D, 239M/408D/523P, 291Y, 291Y/408D, 318I, 335P/408D, 338A, and 408D, wherein the amino acid positions of the polypeptide sequence are numbered with reference to SEQ ID NO: 262. In some embodiments, the engineered galactose oxidase comprises at least one substitution or substitution set selected from C28G/Q239M, C28G/Q239M/Q274N/E408D, C28G/Q239M/F291Y/E408D, C28G/Q239M/K371I/E408D, C28G/K371I, Q239L/Q274H/F291Y/E408D, Q239L/E408D, Q239M, Q239M/Q274N/F291Y/Y359F/G513R, Q239M/F291Y/E408D, Q239M/E408D, Q239M/E408D/H523P, F291Y, F291Y/E408D, V318I, H335P/E408D, L338A, and E408D, wherein the amino acid positions of the polypeptide sequence are numbered with reference to SEQ ID NO: 262.

[0016] In yet some additional embodiments, the engineered galactose oxidase comprises a polypeptide sequence that is at least 85%, 86%, 87%, 88%, 89%, 90%, 91%, 92%, 93%, 94%, 95%, 96%, 97%, 98%, 99% or more identical to the sequence of at least one engineered galactose oxidase variant set forth in Table 2.1, 3.1, 4.1, 5.1, 6.1, 7.1, 8.1, 8.2, and/or 8.3. In still some further embodiments, the engineered galactose oxidase comprises a polypeptide sequence that is at least 85%, 86%, 87%, 88%, 89%, 90%, 91%, 92%, 93%, 94%, 95%, 96%, 97%, 98%, 99% or more identical to the sequence of at least one engineered galactose oxidase variant set forth in SEQ ID NO: 4, 6, 38, 50, 114, 226, and/or 262. In some embodiments, the engineered galactose oxidase is a variant engineered polypeptide set forth in SEQ ID NO: 4, 6, 38, 50, 114, 226, and/or 262. In some further embodiments, the engineered galactose oxidase comprises a polypeptide sequence that is at least 85%, 86%, 87%, 88%, 89%, 90%, 91%, 92%, 93%, 94%, 95%, 96%, 97%, 98%, 99% or more identical to the sequence of at least one engineered galactose oxidase variant set forth in the even numbered sequences of SEQ ID NOS: 4-334. In still some additional embodiments, the engineered galactose oxidase comprises a polypeptide sequence set forth in the even numbered sequences of SEQ ID NOS: 4-334. In some further embodiments, the engineered galactose oxidase comprises at least one improved property compared to wild-type F. graminearium galactose oxidase. In some embodiments, the improved property comprises improved activity on a substrate. In some additional embodiments, the substrate comprises a primary alcohol. In some further embodiments, the substrate comprises an alcohol-containing substrate with one or more additional functional groups. In some further embodiments, the substrate comprises an alcohol-containing phosphorylated substrate. In yet some further embodiments, the improved property comprises improved stereoselectivity. In yet some additional embodiments, the engineered galactose oxidase is purified.

[0017] The present invention also provides compositions comprising at least one engineered galactose oxidase provided herein. In some embodiments, the composition comprises one engineered galactose oxidase provided herein.

[0018] The present invention also provides polynucleotide sequences encoding the engineered galactose oxidases provided herein. In some embodiments, the polynucleotide sequences encode more than one of the engineered galactose oxidases provided herein. The present invention also provides polynucleotide sequences encoding at least one engineered galactose oxidase, wherein the polynucleotide sequence comprises at least 85%, 86%, 87%, 88%, 89%, 90%, 91%, 92%, 93%, 94%, 95%, 96%, 97%, 98%, 99%, or more sequence identity to SEQ ID NOS: 3, 5, 37, 49, 113, 225, and/or 261, wherein the polynucleotide sequence of the engineered galactose oxidase comprises at least one substitution at one or more positions. In some additional embodiments, the polynucleotide sequence encoding at least one engineered galactose oxidase comprises at least 85%, 86%, 87%, 88%, 89%, 90%, 91%, 92%, 93%, 94%, 95%, 96%, 97%, 98%, 99%, or more sequence identity to SEQ ID NOS: 3, 5, 37, 49, 113, 225, and/or 261, or a functional fragment thereof. In some further embodiments, the polynucleotide sequence is operably linked to a control sequence. In some additional embodiments, the polynucleotide sequence is codon optimized. In yet some further embodiments, the polynucleotide comprises an odd-numbered sequence of SEQ ID NOS: 1-333. The present invention also provides expression vectors comprising at least one polynucleotide sequence encoding at least one galactose oxidase provided herein. The present invention also provides host cells comprising at least one expression vector provided herein. The present invention also provides host cells comprising at least one polynucleotide sequence encoding at least one galactose oxidase provided herein.

[0019] The present invention also provides methods of producing an engineered galactose oxidase in a host cell, comprising culturing a host cell under suitable conditions, such that at least one engineered galactose oxidase provided herein is produced. In some embodiments, the methods further comprise recovering at least one engineered galactose oxidase from the culture and/or host cell. In some additional embodiments, the methods further comprise the step of purifying the at least one engineered galactose oxidase provided herein.

### DESCRIPTION OF THE INVENTION

[0020] The present invention provides engineered galactose oxidase (GOase) enzymes, polypeptides having selective oxidative activity on primary alcohols (e.g. 2-ethynylglycerol) and alcohol-containing substrates with additional functional groups, including alcohol-containing phosphorylated substrates (e.g. 2-ethynylglycerol phosphate), and polynucleotides encoding these enzymes, as well as vectors and host cells comprising these polynucleotides and polypeptides. These GOase variants act in a selective manner, minimizing the need for functional group protection operations for untargeted alcohols, as well as providing the desired aldehyde stereoisomer (e.g., R-enantiomer). Methods for producing GOase enzymes are also provided. The present invention further provides compositions comprising the GOase enzymes and methods of using the engineered GOase enzymes. The present invention finds particular use in the production of pharmaceutical and other compounds.

[0021] Unless defined otherwise, all technical and scientific terms used herein generally have the same meaning as commonly understood by one of ordinary skill in the art to which this invention pertains. Generally, the nomenclature used herein and the laboratory procedures of cell culture, molecular genetics, microbiology, organic chemistry, analytical chemistry and nucleic acid chemistry described below are those well-known and commonly employed in the art. Such techniques are well-known and described in numerous texts and reference works well known to those of skill in the art. Standard techniques, or modifications thereof, are used for chemical syntheses and chemical analyses. All patents, patent applications, articles and publications mentioned herein, both supra and infra, are hereby expressly incorporated herein by reference.

[0022] Although any suitable methods and materials similar or equivalent to those described herein find use in the practice of the present invention, some methods and materials are described herein. It is to be understood that this invention is not limited to the particular methodology, protocols, and reagents described, as these may vary, depending upon the context they are used by those of skill in the art. Accordingly, the terms defined immediately below are more fully described by reference to the invention as a whole.

[0023] It is to be understood that both the foregoing general description and the following detailed description are exemplary and explanatory only and are not restrictive of the present invention. The section headings used herein are for organizational purposes only and not to be construed as limiting the subject matter described. Numeric ranges are inclusive of the numbers defining the range. Thus, every numerical range disclosed herein is intended to encompass every narrower numerical range that falls within such broader numerical range, as if such narrower numerical ranges were all expressly written herein. It is also intended that every maximum (or minimum) numerical limitation disclosed herein includes every lower (or higher) numerical limitation, as if such lower (or higher) numerical limitations were expressly written herein.

### Abbreviations

[0024] The abbreviations used for the genetically encoded amino acids are conventional and are as follows: alanine (Ala or A), arginine (Are or R), asparagine (Asn or N), aspartate (Asp or D), cysteine (Cys or C), glutamate (Glu or E), glutamine (Gln or Q), histidine (His or H), isoleucine (Ile or I), leucine (Leu or L), lysine (Lys or K), methionine (Met or M), phenylalanine (Phe or F), proline (Pro or P), serine (Ser or S), threonine (Thr or T), tryptophan (Trp or W), tyrosine (Tyr or Y), and valine (Val or V).

[0025] When the three-letter abbreviations are used, unless specifically preceded by an “L” or a “D” or clear from the context in which the abbreviation is used, the amino acid may be in either the L- or D-configuration about α-carbon (Ca). For example, whereas “Ala” designates alanine without specifying the configuration about the α-carbon, “D-Ala” and “L-Ala” designate D-alanine and L-alanine, respectively. When the one-letter abbreviations are used, upper case letters designate amino acids in the L-configuration about the α-carbon and lower case letters designate amino acids in the D-configuration about the α-carbon. For example, “A” designates L-alanine and “a” designates D-alanine. When polypeptide sequences are presented as a string of one-letter or three-letter abbreviations (or mixtures thereof), the sequences are presented in the amino (N) to carboxy (C) direction in accordance with common convention.

[0026] The abbreviations used for the genetically encoding nucleosides are conventional and are as follows: adenosine (A); guanosine (G); cytidine (C); thymidine (T); and uridine (U). Unless specifically delineated, the abbreviated nucleosides may be either ribonucleosides or 2′-deoxyribonucleosides. The nucleosides may be specified as being either ribonucleosides or 2′-deoxyribonucleosides on an individual basis or on an aggregate basis. When nucleic acid sequences are presented as a string of one-letter abbreviations, the sequences are presented in the 5′ to 3′ direction in accordance with common convention, and the phosphates are not indicated.

### Definitions

[0027] In reference to the present invention, the technical and scientific terms used in the descriptions herein will have the meanings commonly understood by one of ordinary skill in the art, unless specifically defined otherwise. Accordingly, the following terms are intended to have the following meanings.

[0028] As used herein, the singular forms “a”, “an” and “the” include plural referents unless the context clearly indicates otherwise. Thus, for example, reference to “a polypeptide” includes more than one polypeptide.

[0029] Similarly, “comprise,” “comprises,” “comprising” “include,” “includes,” and “including” are interchangeable and not intended to be limiting. Thus, as used herein, the term “comprising” and its cognates are used in their inclusive sense (i.e., equivalent to the term “including” and its corresponding cognates).

[0030] It is to be further understood that where descriptions of various embodiments use the term “comprising,” those skilled in the art would understand that in some specific instances, an embodiment can be alternatively described using language “consisting essentially of” or “consisting of.”

[0031] As used herein, the term “about” means an acceptable error for a particular value. In some instances, “about” means within 0.05%, 0.5%, 1.0%, or 2.0%, of a given value range. In some instances, “about” means within 1, 2, 3, or 4 standard deviations of a given value.

[0032] As used herein, “EC” number refers to the Enzyme Nomenclature of the Nomenclature Committee of the International Union of Biochemistry and Molecular Biology (NC-IUBMB). The IUBMB biochemical classification is a numerical classification system for enzymes based on the chemical reactions they catalyze.

[0033] As used herein, “ATCC” refers to the American Type Culture Collection whose biorepository collection includes genes and strains.

[0034] As used herein, “NCBI” refers to National Center for Biological Information and the sequence databases provided therein.

[0035] As used herein, “galactose oxidase” (“GOase”; EC 1.1.3.9) enzymes are copper-dependent enzymes, that, in the presence of bimolecular oxygen, catalyze the oxidation of primary alcohols and alcohol-containing substrates with additional functional groups, such as alcohol-containing phosphorylated substrates, to the corresponding aldehyde or aldehyde phosphate. They selectively act in both regio- and enantiospecific manners, resulting in synthetic approaches that require little or no functional group protection and yield the desired stereoisomer. The manner of oxidation is mild and controlled, such that activity does not lead to over-oxidation of the alcohol to its corresponding carboxylic acid. The term “galactose oxidase” includes both naturally-occurring and engineered enzymes and may include polypeptides with altered catalytic properties, including changes in specific activity, substrate specificity, and the like, as compared to a naturally-occurring or an engineered reference polypeptide.

[0036] As used herein, “horseradish peroxidase” (HRP, EC 1.11.1.7) enzyme is an iron-dependent enzyme that activates and maintains GOase catalytic activity by oxidizing an inactive redox state of the active site that occurs during normal GOase catalytic cycling. Type I HRP is specifically employed in a catalytic manner in the examples included herein, however it is not meant to be exclusive in this role, as there are other isoforms of this enzyme class and chemical reagents that can fulfill this role.

[0037] As used herein, “catalase” refers to an iron-dependent enzyme (EC 1.11.1.6) which acts on hydrogen peroxide, a byproduct of GOase oxidation, which can render GOase inactive above certain levels of hydrogen peroxide. Catalase is employed as a catalytic maintenance enzyme specifically in the examples herein, while in some embodiments it could be replaced by other methods, such as electrochemical decomposition of hydrogen peroxide.

[0038] “Amino acids” are referred to herein by either their commonly known three-letter symbols or by the one-letter symbols recommended by IUPAC-IUB Biochemical Nomenclature Commission. Nucleotides, likewise, may be referred to by their commonly accepted single letter codes.

[0039] As used herein, “hydrophilic amino acid or residue” refers to an amino acid or residue having a side chain exhibiting a hydrophobicity of less than zero according to the normalized consensus hydrophobicity scale of Eisenberg et al., (Eisenberg et al., J. Mol. Biol., 179:125-142 [1984]). Genetically encoded hydrophilic amino acids include L-Thr (T), L-Ser (S), L-His (H), L-Glu (E), L-Asn (N), L-Gln (Q), L-Asp (D), L-Lys (K) and L-Arg (R).

[0040] As used herein, “acidic amino acid or residue” refers to a hydrophilic amino acid or residue having a side chain exhibiting a pKa value of less than about 6 when the amino acid is included in a peptide or polypeptide. Acidic amino acids typically have negatively charged side chains at physiological pH due to loss of a hydrogen ion. Genetically encoded acidic amino acids include L-Glu (E) and L-Asp (D).

[0041] As used herein, “basic amino acid or residue” refers to a hydrophilic amino acid or residue having a side chain exhibiting a pKa value of greater than about 6 when the amino acid is included in a peptide or polypeptide. Basic amino acids typically have positively charged side chains at physiological pH due to association with hydronium ion. Genetically encoded basic amino acids include L-Arg (R) and L-Lys (K).

[0042] As used herein, “polar amino acid or residue” refers to a hydrophilic amino acid or residue having a side chain that is uncharged at physiological pH, but which has at least one bond in which the pair of electrons shared in common by two atoms is held more closely by one of the atoms. Genetically encoded polar amino acids include L-Asn (N), L-Gln (Q), L-Ser (S) and L-Thr (T).

[0043] As used herein, “hydrophobic amino acid or residue” refers to an amino acid or residue having a side chain exhibiting a hydrophobicity of greater than zero according to the normalized consensus hydrophobicity scale of Eisenberg et al., (Eisenberg et al., J. Mol. Biol., 179:125-142 [1984]). Genetically encoded hydrophobic amino acids include L-Pro (P), L-Ile (I), L-Phe (F), L-Val (V), L-Leu (L), L-Trp (W), L-Met (M), L-Ala (A) and L-Tyr (Y).

[0044] As used herein, “aromatic amino acid or residue” refers to a hydrophilic or hydrophobic amino acid or residue having a side chain that includes at least one aromatic or heteroaromatic ring. Genetically encoded aromatic amino acids include L-Phe (F), L-Tyr (Y) and L-Trp (W). Although owing to the pKa of its heteroaromatic nitrogen atom L-His (H) it is sometimes classified as a basic residue, or as an aromatic residue as its side chain includes a heteroaromatic ring, herein histidine is classified as a hydrophilic residue or as a “constrained residue” (see below).

[0045] As used herein, “constrained amino acid or residue” refers to an amino acid or residue that has a constrained geometry. Herein, constrained residues include L-Pro (P) and L-His (H). Histidine has a constrained geometry because it has a relatively small imidazole ring. Proline has a constrained geometry because it also has a five membered ring.

[0046] As used herein, “non-polar amino acid or residue” refers to a hydrophobic amino acid or residue having a side chain that is uncharged at physiological pH and which has bonds in which the pair of electrons shared in common by two atoms is generally held equally by each of the two atoms (i.e., the side chain is not polar). Genetically encoded non-polar amino acids include L-Gly (G), L-Leu (L), L-Val (V), L-Ile (I), L-Met (M) and L-Ala (A).

[0047] As used herein, “aliphatic amino acid or residue” refers to a hydrophobic amino acid or residue having an aliphatic hydrocarbon side chain. Genetically encoded aliphatic amino acids include L-Ala (A), L-Val (V), L-Leu (L) and L-Ile (I). It is noted that cysteine (or “L-Cys” or “[C]”) is unusual in that it can form disulfide bridges with other L-Cys (C) amino acids or other sulfanyl- or sulfhydryl-containing amino acids. The “cysteine-like residues” include cysteine and other amino acids that contain sulfhydryl moieties that are available for formation of disulfide bridges. The ability of L-Cys (C) (and other amino acids with —SH containing side chains) to exist in a peptide in either the reduced free —SH or oxidized disulfide-bridged form affects whether L-Cys (C) contributes net hydrophobic or hydrophilic character to a peptide. While L-Cys (C) exhibits a hydrophobicity of 0.29 according to the normalized consensus scale of Eisenberg (Eisenberg et al., 1984, supra), it is to be understood that for purposes of the present disclosure, L-Cys (C) is categorized into its own unique group.

[0048] As used herein, “small amino acid or residue” refers to an amino acid or residue having a side chain that is composed of a total of three or fewer carbon and/or heteroatoms (excluding the α-carbon and hydrogens). The small amino acids or residues may be further categorized as aliphatic, non-polar, polar or acidic small amino acids or residues, in accordance with the above definitions. Genetically-encoded small amino acids include L-Ala (A), L-Val (V), L-Cys (C), L-Asn (N), L-Ser (S), L-Thr (T) and L-Asp (D).

[0049] As used herein, “hydroxyl-containing amino acid or residue” refers to an amino acid containing a hydroxyl (—OH) moiety. Genetically-encoded hydroxyl-containing amino acids include L-Ser (S) L-Thr (T) and L-Tyr (Y).

[0050] As used herein, “polynucleotide” and “nucleic acid” refer to two or more nucleotides that are covalently linked together. The polynucleotide may be wholly comprised of ribonucleotides (i.e., RNA), wholly comprised of 2′ deoxyribonucleotides (i.e., DNA), or comprised of mixtures of ribo- and 2′ deoxyribonucleotides. While the nucleosides will typically be linked together via standard phosphodiester linkages, the polynucleotides may include one or more non-standard linkages. The polynucleotide may be single-stranded or double-stranded, or may include both single-stranded regions and double-stranded regions. Moreover, while a polynucleotide will typically be composed of the naturally occurring encoding nucleobases (i.e., adenine, guanine, uracil, thymine and cytosine), it may include one or more modified and/or synthetic nucleobases, such as, for example, inosine, xanthine, hypoxanthine, etc. In some embodiments, such modified or synthetic nucleobases are nucleobases encoding amino acid sequences.

[0051] As used herein, “coding sequence” refers to that portion of a nucleic acid (e.g., a gene) that encodes an amino acid sequence of a protein.

[0052] As used herein, the terms “biocatalysis,” “biocatalytic,” “biotransformation,” and “biosynthesis” refer to the use of enzymes to perform chemical reactions on organic compounds.

[0053] As used herein, “wild-type” and “naturally-occurring” refer to the form found in nature. For example, a wild-type polypeptide or polynucleotide sequence is a sequence present in an organism that can be isolated from a source in nature and which has not been intentionally modified by human manipulation.

[0054] As used herein, “recombinant,” “engineered,” “variant,” and “non-naturally occurring” when used with reference to a cell, nucleic acid, or polypeptide, refers to a material, or a material corresponding to the natural or native form of the material, that has been modified in a manner that would not otherwise exist in nature. In some embodiments, the cell, nucleic acid or polypeptide is identical a naturally occurring cell, nucleic acid or polypeptide, but is produced or derived from synthetic materials and/or by manipulation using recombinant techniques. Non-limiting examples include, among others, recombinant cells expressing genes that are not found within the native (non-recombinant) form of the cell or express native genes that are otherwise expressed at a different level.

[0055] The term “percent (%) sequence identity” is used herein to refer to comparisons among polynucleotides or polypeptides, and are determined by comparing two optimally aligned sequences over a comparison window, wherein the portion of the polynucleotide or polypeptide sequence in the comparison window may comprise additions or deletions (i.e., gaps) as compared to the reference sequence for optimal alignment of the two sequences. The percentage may be calculated by determining the number of positions at which the identical nucleic acid base or amino acid residue occurs in both sequences to yield the number of matched positions, dividing the number of matched positions by the total number of positions in the window of comparison and multiplying the result by 100 to yield the percentage of sequence identity. Alternatively, the percentage may be calculated by determining the number of positions at which either the identical nucleic acid base or amino acid residue occurs in both sequences or a nucleic acid base or amino acid residue is aligned with a gap to yield the number of matched positions, dividing the number of matched positions by the total number of positions in the window of comparison and multiplying the result by 100 to yield the percentage of sequence identity.

[0056] Those of skill in the art appreciate that there are many established algorithms available to align two sequences. Optimal alignment of sequences for comparison can be conducted by any suitable method, including, but not limited to the local homology algorithm of Smith and Waterman (Smith and Waterman, Adv. Appl. Math., 2:482 [1981]), by the homology alignment algorithm of Needleman and Wunsch (Needleman and Wunsch, J. Mol. Biol., 48:443 [1970]), by the search for similarity method of Pearson and Lipman (Pearson and Lipman, Proc. Natl. Acad. Sci. USA 85:2444 [1988]), by computerized implementations of these algorithms (e.g., GAP, BESTFIT, FASTA, and TFASTA in the GCG Wisconsin Software Package), or by visual inspection, as known in the art. Examples of algorithms that are suitable for determining percent sequence identity and sequence similarity include, but are not limited to the BLAST and BLAST 2.0 algorithms, which are described by Altschul et al. (See Altschul et al., J. Mol. Biol., 215: 403-410 [1990]; and Altschul et al., Nucl. Acids Res., 3389-3402 [1977], respectively). Software for performing BLAST analyses is publicly available through the National Center for Biotechnology Information website. This algorithm involves first identifying high scoring sequence pairs (HSPs) by identifying short words of length W in the query sequence, which either match or satisfy some positive-valued threshold score T when aligned with a word of the same length in a database sequence. T is referred to as, the neighborhood word score threshold (See, Altschul et al., supra). These initial neighborhood word hits act as seeds for initiating searches to find longer HSPs containing them. The word hits are then extended in both directions along each sequence for as far as the cumulative alignment score can be increased. Cumulative scores are calculated using, for nucleotide sequences, the parameters M (reward score for a pair of matching residues; always >0) and N (penalty score for mismatching residues; always <0). For amino acid sequences, a scoring matrix is used to calculate the cumulative score. Extension of the word hits in each direction are halted when: the cumulative alignment score falls off by the quantity X from its maximum achieved value; the cumulative score goes to zero or below, due to the accumulation of one or more negative-scoring residue alignments; or the end of either sequence is reached. The BLAST algorithm parameters W, T, and X determine the sensitivity and speed of the alignment. The BLASTN program (for nucleotide sequences) uses as defaults a wordlength (W) of 11, an expectation (E) of 10, M=5, N=−4, and a comparison of both strands. For amino acid sequences, the BLASTP program uses as defaults a word length (W) of 3, an expectation (E) of 10, and the BLOSUM62 scoring matrix (See, Henikoff and Henikoff, Proc. Natl. Acad. Sci. USA 89:10915 [1989]). Exemplary determination of sequence alignment and % sequence identity can employ the BESTFIT or GAP programs in the GCG Wisconsin Software package (Accelrys, Madison WI), using default parameters provided.

[0057] As used herein, “reference sequence” refers to a defined sequence used as a basis for a sequence and/or activity comparison. A reference sequence may be a subset of a larger sequence, for example, a segment of a full-length gene or polypeptide sequence. Generally, a reference sequence is at least 20 nucleotide or amino acid residues in length, at least 25 residues in length, at least 50 residues in length, at least 100 residues in length or the full length of the nucleic acid or polypeptide. Since two polynucleotides or polypeptides may each (1) comprise a sequence (i.e., a portion of the complete sequence) that is similar between the two sequences, and (2) may further comprise a sequence that is divergent between the two sequences, sequence comparisons between two (or more) polynucleotides or polypeptides are typically performed by comparing sequences of the two polynucleotides or polypeptides over a “comparison window” to identify and compare local regions of sequence similarity. In some embodiments, a “reference sequence” can be based on a primary amino acid sequence, where the reference sequence is a sequence that can have one or more changes in the primary sequence.

[0058] As used herein, “comparison window” refers to a conceptual segment of at least about 20 contiguous nucleotide positions or amino acid residues wherein a sequence may be compared to a reference sequence of at least 20 contiguous nucleotides or amino acids and wherein the portion of the sequence in the comparison window may comprise additions or deletions (i.e., gaps) of 20 percent or less as compared to the reference sequence (which does not comprise additions or deletions) for optimal alignment of the two sequences. The comparison window can be longer than 20 contiguous residues, and includes, optionally 30, 40, 50, 100, or longer windows.

[0059] As used herein, “corresponding to,” “reference to,” and “relative to” when used in the context of the numbering of a given amino acid or polynucleotide sequence refer to the numbering of the residues of a specified reference sequence when the given amino acid or polynucleotide sequence is compared to the reference sequence. In other words, the residue number or residue position of a given polymer is designated with respect to the reference sequence rather than by the actual numerical position of the residue within the given amino acid or polynucleotide sequence. For example, a given amino acid sequence, such as that of an engineered galactose oxidase, can be aligned to a reference sequence by introducing gaps to optimize residue matches between the two sequences. In these cases, although the gaps are present, the numbering of the residue in the given amino acid or polynucleotide sequence is made with respect to the reference sequence to which it has been aligned.

[0060] As used herein, “substantial identity” refers to a polynucleotide or polypeptide sequence that has at least 80 percent sequence identity, at least 85 percent identity, at least between 89 to 95 percent sequence identity, or more usually, at least 99 percent sequence identity as compared to a reference sequence over a comparison window of at least 20 residue positions, frequently over a window of at least 30-50 residues, wherein the percentage of sequence identity is calculated by comparing the reference sequence to a sequence that includes deletions or additions which total 20 percent or less of the reference sequence over the window of comparison. In some specific embodiments applied to polypeptides, the term “substantial identity” means that two polypeptide sequences, when optimally aligned, such as by the programs GAP or BESTFIT using default gap weights, share at least 80 percent sequence identity, preferably at least 89 percent sequence identity, at least 95 percent sequence identity or more (e.g., 99 percent sequence identity). In some embodiments, residue positions that are not identical in sequences being compared differ by conservative amino acid substitutions.

[0061] As used herein, “amino acid difference” and “residue difference” refer to a difference in the amino acid residue at a position of a polypeptide sequence relative to the amino acid residue at a corresponding position in a reference sequence. In some cases, the reference sequence has a histidine tag, but the numbering is maintained relative to the equivalent reference sequence without the histidine tag. The positions of amino acid differences generally are referred to herein as “Xn,” where n refers to the corresponding position in the reference sequence upon which the residue difference is based. For example, a “residue difference at position X93 as compared to SEQ ID NO:4” refers to a difference of the amino acid residue at the polypeptide position corresponding to position 93 of SEQ ID NO:4. Thus, if the reference polypeptide of SEQ ID NO:4 has a serine at position 93, then a “residue difference at position X93 as compared to SEQ ID NO:4” an amino acid substitution of any residue other than serine at the position of the polypeptide corresponding to position 93 of SEQ ID NO:4. In most instances herein, the specific amino acid residue difference at a position is indicated as “XnY” where “Xn” specified the corresponding position as described above, and “Y” is the single letter identifier of the amino acid found in the engineered polypeptide (i.e., the different residue than in the reference polypeptide). In some instances (e.g., in the Tables presented in the Examples), the present invention also provides specific amino acid differences denoted by the conventional notation “AnB”, where A is the single letter identifier of the residue in the reference sequence, “n” is the number of the residue position in the reference sequence, and B is the single letter identifier of the residue substitution in the sequence of the engineered polypeptide. In some instances, a polypeptide of the present invention can include one or more amino acid residue differences relative to a reference sequence, which is indicated by a list of the specified positions where residue differences are present relative to the reference sequence. In some embodiments, where more than one amino acid can be used in a specific residue position of a polypeptide, the various amino acid residues that can be used are separated by a “/” (e.g., X307H/X307P or X307H/P). The slash may also be used to indicate multiple substitutions within a given variant (i.e., there is more than one substitution present in a given sequence, such as in a combinatorial variant). In some embodiments, the present invention includes engineered polypeptide sequences comprising one or more amino acid differences comprising conservative or non-conservative amino acid substitutions. In some additional embodiments, the present invention provides engineered polypeptide sequences comprising both conservative and non-conservative amino acid substitutions.

[0062] As used herein, “conservative amino acid substitution” refers to a substitution of a residue with a different residue having a similar side chain, and thus typically involves substitution of the amino acid in the polypeptide with amino acids within the same or similar defined class of amino acids. By way of example and not limitation, in some embodiments, an amino acid with an aliphatic side chain is substituted with another aliphatic amino acid (e.g., alanine, valine, leucine, and isoleucine); an amino acid with an hydroxyl side chain is substituted with another amino acid with an hydroxyl side chain (e.g., serine and threonine); an amino acids having aromatic side chains is substituted with another amino acid having an aromatic side chain (e.g., phenylalanine, tyrosine, tryptophan, and histidine); an amino acid with a basic side chain is substituted with another amino acid with a basis side chain (e.g., lysine and arginine); an amino acid with an acidic side chain is substituted with another amino acid with an acidic side chain (e.g., aspartic acid or glutamic acid); and/or a hydrophobic or hydrophilic amino acid is replaced with another hydrophobic or hydrophilic amino acid, respectively.

[0063] As used herein, “non-conservative substitution” refers to substitution of an amino acid in the polypeptide with an amino acid with significantly differing side chain properties. Non-conservative substitutions may use amino acids between, rather than within, the defined groups and affects (a) the structure of the peptide backbone in the area of the substitution (e.g., proline for glycine) (b) the charge or hydrophobicity, or (c) the bulk of the side chain. By way of example and not limitation, an exemplary non-conservative substitution can be an acidic amino acid substituted with a basic or aliphatic amino acid; an aromatic amino acid substituted with a small amino acid; and a hydrophilic amino acid substituted with a hydrophobic amino acid.

[0064] As used herein, “deletion” refers to modification to the polypeptide by removal of one or more amino acids from the reference polypeptide. Deletions can comprise removal of 1 or more amino acids, 2 or more amino acids, 5 or more amino acids, 10 or more amino acids, 15 or more amino acids, or 20 or more amino acids, up to 10% of the total number of amino acids, or up to 20% of the total number of amino acids making up the reference enzyme while retaining enzymatic activity and/or retaining the improved properties of an engineered galactose oxidase enzyme. Deletions can be directed to the internal portions and/or terminal portions of the polypeptide. In various embodiments, the deletion can comprise a continuous segment or can be discontinuous. Deletions are typically indicated by “−” in amino acid sequences.

[0065] As used herein, “insertion” refers to modification to the polypeptide by addition of one or more amino acids from the reference polypeptide. Insertions can be in the internal portions of the polypeptide, or to the carboxy or amino terminus. Insertions as used herein include fusion proteins as is known in the art. The insertion can be a contiguous segment of amino acids or separated by one or more of the amino acids in the naturally occurring polypeptide.

[0066] The term “amino acid substitution set” or “substitution set” refers to a group of amino acid substitutions in a polypeptide sequence, as compared to a reference sequence. A substitution set can have 1, 2, 3, 4, 5, 6, 7, 8, 9, 10, 11, 12, 13, 14, 15, or more amino acid substitutions. In some embodiments, a substitution set refers to the set of amino acid substitutions that is present in any of the variant galactose oxidases listed in the Tables provided in the Examples

[0067] A “functional fragment” and “biologically active fragment” are used interchangeably herein to refer to a polypeptide that has an amino-terminal and/or carboxy-terminal deletion(s) and/or internal deletions, but where the remaining amino acid sequence is identical to the corresponding positions in the sequence to which it is being compared (e.g., a full-length engineered galactose oxidase of the present invention) and that retains substantially all of the activity of the full-length polypeptide.

[0068] As used herein, “isolated polypeptide” refers to a polypeptide which is substantially separated from other contaminants that naturally accompany it (e.g., protein, lipids, and polynucleotides). The term embraces polypeptides which have been removed or purified from their naturally-occurring environment or expression system (e.g., within a host cell or via in vitro synthesis). The recombinant galactose oxidase polypeptides may be present within a cell, present in the cellular medium, or prepared in various forms, such as lysates or isolated preparations. As such, in some embodiments, the recombinant galactose oxidase polypeptides can be an isolated polypeptide.

[0069] As used herein, “substantially pure polypeptide” or “purified protein” refers to a composition in which the polypeptide species is the predominant species present (i.e., on a molar or weight basis it is more abundant than any other individual macromolecular species in the composition), and is generally a substantially purified composition when the object species comprises at least about 50 percent of the macromolecular species present by mole or % weight. However, in some embodiments, the composition comprising galactose oxidase comprises galactose oxidase that is less than 50% pure (e.g., about 10%, about 20%, about 30%, about 40%, or about 50%). Generally, a substantially pure galactose oxidase composition comprises about 60% or more, about 70% or more, about 80% or more, about 90% or more, about 95% or more, and about 98% or more of all macromolecular species by mole or % weight present in the composition. In some embodiments, the object species is purified to essential homogeneity (i.e., contaminant species cannot be detected in the composition by conventional detection methods) wherein the composition consists essentially of a single macromolecular species. Solvent species, small molecules (<500 Daltons), and elemental ion species are not considered macromolecular species. In some embodiments, the isolated recombinant galactose oxidase polypeptides are substantially pure polypeptide compositions.

[0070] As used herein, “improved enzyme property” refers to at least one improved property of an enzyme. In some embodiments, the present invention provides engineered galactose oxidase polypeptides that exhibit an improvement in any enzyme property as compared to a reference galactose oxidase polypeptide and/or a wild-type galactose oxidase polypeptide, and/or another engineered galactose oxidase polypeptide. Thus, the level of “improvement” can be determined and compared between various galactose oxidase polypeptides, including wild-type, as well as engineered galactose oxidases. Improved properties include, but are not limited to, such properties as increased protein expression, increased thermoactivity, increased thermostability, increased pH activity, increased stability, increased enzymatic activity, increased substrate specificity or affinity, increased specific activity, increased resistance to substrate or end-product inhibition, increased chemical stability, improved chemoselectivity, improved solvent stability, increased tolerance to acidic pH, increased tolerance to proteolytic activity (i.e., reduced sensitivity to proteolysis), reduced aggregation, increased solubility, and altered temperature profile. In additional embodiments, the term is used in reference to the at least one improved property of galactose oxidase enzymes. In some embodiments, the present invention provides engineered galactose oxidase polypeptides that exhibit an improvement in any enzyme property as compared to a reference galactose oxidase polypeptide and/or a wild-type galactose oxidase polypeptide, and/or another engineered galactose oxidase polypeptide. Thus, the level of “improvement” can be determined and compared between various galactose oxidase polypeptides, including wild-type, as well as engineered galactose oxidases.

[0071] As used herein, “increased enzymatic activity” and “enhanced catalytic activity” refer to an improved property of the engineered polypeptides, which can be represented by an increase in specific activity (e.g., product produced/time/weight protein) or an increase in percent conversion of the substrate to the product (e.g., percent conversion of starting amount of substrate to product in a specified time period using a specified amount of enzyme) as compared to the reference enzyme. In some embodiments, the terms refer to an improved property of engineered galactose oxidase polypeptides provided herein, which can be represented by an increase in specific activity (e.g., product produced/time/weight protein) or an increase in percent conversion of the substrate to the product (e.g., percent conversion of starting amount of substrate to product in a specified time period using a specified amount of galactose oxidase) as compared to the reference galactose oxidase enzyme. In some embodiments, the terms are used in reference to improved galactose oxidase enzymes provided herein. Exemplary methods to determine enzyme activity of the engineered galactose oxidases of the present invention are provided in the Examples. Any property relating to enzyme activity may be affected, including the classical enzyme properties of Kₘ, Vₘₐₓ or k_{cat}, changes of which can lead to increased enzymatic activity. For example, improvements in enzyme activity can be from about 1.1-fold the enzymatic activity of the corresponding wild-type enzyme, to as much as 2-fold, 5-fold, 10-fold, 20-fold, 25-fold, 50-fold, 75-fold, 100-fold, 150-fold, 200-fold or more enzymatic activity than the naturally occurring galactose oxidase or another engineered galactose oxidase from which the galactose oxidase polypeptides were derived.

[0072] As used herein, “conversion” refers to the enzymatic conversion (or biotransformation) of a substrate(s) to the corresponding product(s). “Percent conversion” refers to the percent of the substrate that is converted to the product within a period of time under specified conditions. Thus, the “enzymatic activity” or “activity” of a galactose oxidase polypeptide can be expressed as “percent conversion” of the substrate to the product in a specific period of time.

[0073] Enzymes with “generalist properties” (or “generalist enzymes”) refer to enzymes that exhibit improved activity for a wide range of substrates, as compared to a parental sequence. Generalist enzymes do not necessarily demonstrate improved activity for every possible substrate. In some embodiments, the present invention provides galactose oxidase variants with generalist properties, in that they demonstrate similar or improved activity relative to the parental gene for a wide range of sterically and electronically diverse substrates. In addition, the generalist enzymes provided herein were engineered to be improved across a wide range of diverse molecules to increase the production of metabolites/products.

[0074] The term “stringent hybridization conditions” is used herein to refer to conditions under which nucleic acid hybrids are stable. As known to those of skill in the art, the stability of hybrids is reflected in the melting temperature (Tₘ) of the hybrids. In general, the stability of a hybrid is a function of ion strength, temperature, G/C content, and the presence of chaotropic agents. The Tₘ values for polynucleotides can be calculated using known methods for predicting melting temperatures (See e.g., Baldino et al., Meth. Enzymol., 168:761-777 [1989]; Bolton et al., Proc. Natl. Acad. Sci. USA 48:1390 [1962]; Bresslauer et al., Proc. Natl. Acad. Sci. USA 83:8893-8897 [1986]; Freier et al., Proc. Natl. Acad. Sci. USA 83:9373-9377 [1986]; Kierzek et al., Biochem., 25:7840-7846 [1986]; Rychlik et al., Nucl. Acids Res., 18:6409-6412 [1990] (erratum, Nucl. Acids Res., 19:698 [1991]); Sambrook et al., supra); Suggs et al., 1981, in Developmental Biology Using Purified Genes, Brown et al. [eds.], pp. 683-693, Academic Press, Cambridge, MA [1981]; and Wetmur, Crit. Rev. Biochem. Mol. Biol. 26:227-259 [1991]). In some embodiments, the polynucleotide encodes the polypeptide disclosed herein and hybridizes under defined conditions, such as moderately stringent or highly stringent conditions, to the complement of a sequence encoding an engineered galactose oxidase enzyme of the present invention.

[0075] As used herein, “hybridization stringency” relates to hybridization conditions, such as washing conditions, in the hybridization of nucleic acids. Generally, hybridization reactions are performed under conditions of lower stringency, followed by washes of varying but higher stringency. The term “moderately stringent hybridization” refers to conditions that permit target-DNA to bind a complementary nucleic acid that has about 60% identity, preferably about 75% identity, about 85% identity to the target DNA, with greater than about 90% identity to target-polynucleotide. Exemplary moderately stringent conditions are conditions equivalent to hybridization in 50% formamide, 5× Denhart's solution, 5×SSPE, 0.2% SDS at 42° C., followed by washing in 0.2×SSPE, 0.2% SDS, at 42° C. “High stringency hybridization” refers generally to conditions that are about 10° C. or less from the thermal melting temperature Tₘ as determined under the solution condition for a defined polynucleotide sequence. In some embodiments, a high stringency condition refers to conditions that permit hybridization of only those nucleic acid sequences that form stable hybrids in 0.018M NaCl at 65° C. (i.e., if a hybrid is not stable in 0.018M NaCl at 65° C., it will not be stable under high stringency conditions, as contemplated herein). High stringency conditions can be provided, for example, by hybridization in conditions equivalent to 50% formamide, 5× Denhart's solution, 5×SSPE, 0.2% SDS at 42° C., followed by washing in 0.1×SSPE, and 0.1% SDS at 65° C. Another high stringency condition is hybridizing in conditions equivalent to hybridizing in 5× SSC containing 0.1% (w/v) SDS at 65° C. and washing in 0.1× SSC containing 0.1% SDS at 65° C. Other high stringency hybridization conditions, as well as moderately stringent conditions, are described in the references cited above.

[0076] As used herein, “codon optimized” refers to changes in the codons of the polynucleotide encoding a protein to those preferentially used in a particular organism such that the encoded protein is efficiently expressed in the organism of interest. Although the genetic code is degenerate in that most amino acids are represented by several codons, called “synonyms” or “synonymous” codons, it is well known that codon usage by particular organisms is nonrandom and biased towards particular codon triplets. This codon usage bias may be higher in reference to a given gene, genes of common function or ancestral origin, highly expressed proteins versus low copy number proteins, and the aggregate protein coding regions of an organism's genome. In some embodiments, the polynucleotides encoding the galactose oxidase enzymes may be codon optimized for optimal production in the host organism selected for expression.

[0077] As used herein, “preferred,” “optimal,” and “high codon usage bias” codons when used alone or in combination refer(s) interchangeably to codons that are used at higher frequency in the protein coding regions than other codons that code for the same amino acid. The preferred codons may be determined in relation to codon usage in a single gene, a set of genes of common function or origin, highly expressed genes, the codon frequency in the aggregate protein coding regions of the whole organism, codon frequency in the aggregate protein coding regions of related organisms, or combinations thereof. Codons whose frequency increases with the level of gene expression are typically optimal codons for expression. A variety of methods are known for determining the codon frequency (e.g., codon usage, relative synonymous codon usage) and codon preference in specific organisms, including multivariate analysis, for example, using cluster analysis or correspondence analysis, and the effective number of codons used in a gene (See e.g., GCG CodonPreference, Genetics Computer Group Wisconsin Package; CodonW, Peden, University of Nottingham; McInerney, Bioinform., 14:372-73 [1998]; Stenico et al., Nucl. Acids Res., 222437-46 [1994]; and Wright, Gene 87:23-29 [1990]). Codon usage tables are available for many different organisms (See e.g., Wada et al., Nucl. Acids Res., 20:2111-2118 [1992]; Nakamura et al., Nucl. Acids Res., 28:292 [2000]; Duret, et al., supra; Henaut and Danchin, in Escherichia coli and Salmonella, Neidhardt, et al. (eds.), ASM Press, Washington D.C., p. 2047-2066 [1996]). The data source for obtaining codon usage may rely on any available nucleotide sequence capable of coding for a protein. These data sets include nucleic acid sequences actually known to encode expressed proteins (e.g., complete protein coding sequences-CDS), expressed sequence tags (ESTS), or predicted coding regions of genomic sequences (See e.g., Mount, Bioinformatics: Sequence and Genome Analysis, Chapter 8, Cold Spring Harbor Laboratory Press, Cold Spring Harbor, N.Y. [2001]; Uberbacher, Meth. Enzymol., 266:259-281 [1996]; and Tiwari et al., Comput. Appl. Biosci., 13:263-270 [1997]).

[0078] As used herein, “control sequence” includes all components, which are necessary or advantageous for the expression of a polynucleotide and/or polypeptide of the present invention. Each control sequence may be native or foreign to the nucleic acid sequence encoding the polypeptide. Such control sequences include, but are not limited to, a leader, polyadenylation sequence, propeptide sequence, promoter sequence, signal peptide sequence, initiation sequence and transcription terminator. At a minimum, the control sequences include a promoter, and transcriptional and translational stop signals. The control sequences may be provided with linkers for the purpose of introducing specific restriction sites facilitating ligation of the control sequences with the coding region of the nucleic acid sequence encoding a polypeptide.

[0079] “Operably linked” is defined herein as a configuration in which a control sequence is appropriately placed (i.e., in a functional relationship) at a position relative to a polynucleotide of interest such that the control sequence directs or regulates the expression of the polynucleotide and/or polypeptide of interest.

[0080] “Promoter sequence” refers to a nucleic acid sequence that is recognized by a host cell for expression of a polynucleotide of interest, such as a coding sequence. The promoter sequence contains transcriptional control sequences, which mediate the expression of a polynucleotide of interest. The promoter may be any nucleic acid sequence which shows transcriptional activity in the host cell of choice including mutant, truncated, and hybrid promoters, and may be obtained from genes encoding extracellular or intracellular polypeptides either homologous or heterologous to the host cell.

[0081] The phrase “suitable reaction conditions” refers to those conditions in the enzymatic conversion reaction solution (e.g., ranges of enzyme loading, substrate loading, temperature, pH, buffers, co-solvents, etc.) under which a galactose oxidase polypeptide of the present invention is capable of converting a substrate to the desired product compound. Some exemplary “suitable reaction conditions” are provided herein.

[0082] As used herein, “loading,” such as in “compound loading” or “enzyme loading” refers to the concentration or amount of a component in a reaction mixture at the start of the reaction.

[0083] As used herein, “substrate” in the context of an enzymatic conversion reaction process refers to the compound or molecule acted on by the engineered enzymes provided herein (e.g., engineered galactose oxidase polypeptides).

[0084] As used herein, “increasing” yield of a product (e.g., the R-enantiomer of 3-ethynylglyceraldehyde phosphate) from a reaction occurs when a particular component present during the reaction (e.g., a galactose oxidase enzyme) causes more product to be produced, compared with a reaction conducted under the same conditions with the same substrate and other substituents, but in the absence of the component of interest.

[0085] A reaction is said to be “substantially free” of a particular enzyme if the amount of that enzyme compared with other enzymes that participate in catalyzing the reaction is less than about 2%, about 1%, or about 0.1% (wt/wt).

[0086] As used herein, “fractionating” a liquid (e.g., a culture broth) means applying a separation process (e.g., salt precipitation, column chromatography, size exclusion, and filtration) or a combination of such processes to provide a solution in which a desired protein comprises a greater percentage of total protein in the solution than in the initial liquid product.

[0087] As used herein, “starting composition” refers to any composition that comprises at least one substrate. In some embodiments, the starting composition comprises any suitable substrate.

[0088] As used herein, “product” in the context of an enzymatic conversion process refers to the compound or molecule resulting from the action of an enzymatic polypeptide on a substrate.

[0089] As used herein, “equilibration” as used herein refers to the process resulting in a steady state concentration of chemical species in a chemical or enzymatic reaction (e.g., interconversion of two species A and B), including interconversion of stereoisomers, as determined by the forward rate constant and the reverse rate constant of the chemical or enzymatic reaction.

[0090] “Cofactor,” as used herein, refers to a non-protein compound that operates in combination with an enzyme in catalyzing a reaction.

[0091] As used herein, “alkyl” refers to saturated hydrocarbon groups of from 1 to 18 carbon atoms inclusively, either straight chained or branched, more preferably from 1 to 8 carbon atoms inclusively, and most preferably 1 to 6 carbon atoms inclusively. An alkyl with a specified number of carbon atoms is denoted in parenthesis (e.g., (C₁-C₄)alkyl refers to an alkyl of 1 to 4 carbon atoms).

[0092] As used herein, “alkenyl” refers to groups of from 2 to 12 carbon atoms inclusively, either straight or branched containing at least one double bond but optionally containing more than one double bond.

[0093] As used herein, “alkynyl” refers to groups of from 2 to 12 carbon atoms inclusively, either straight or branched containing at least one triple bond but optionally containing more than one triple bond, and additionally optionally containing one or more double bonded moieties.

[0094] As used herein, “heteroalkyl, “heteroalkenyl,” and heteroalkynyl,” refer to alkyl, alkenyl and alkynyl as defined herein in which one or more of the carbon atoms are each independently replaced with the same or different heteroatoms or heteroatomic groups. Heteroatoms and/or heteroatomic groups which can replace the carbon atoms include, but are not limited to, —O—, —S—, —S—O—, —NR^{α}—, —PH—, —S(O)—, —S(O)2-, —S(O) NR^{α}—, —S(O)₂NR^{α}—, and the like, including combinations thereof, where each R^{α} is independently selected from hydrogen, alkyl, heteroalkyl, cycloalkyl, heterocycloalkyl, aryl, and heteroaryl.

[0095] As used herein, “alkoxy” refers to the group —OR^{β} wherein R^{β} is an alkyl group is as defined above including optionally substituted alkyl groups as also defined herein.

[0096] As used herein, “aryl” refers to an unsaturated aromatic carbocyclic group of from 6 to 12 carbon atoms inclusively having a single ring (e.g., phenyl) or multiple condensed rings (e.g., naphthyl or anthryl). Exemplary aryls include phenyl, pyridyl, naphthyl and the like.

[0097] As used herein, “amino” refers to the group —NH₂. Substituted amino refers to the group —NHR^{δ}, NR^{δ}R^{δ}, and NR^{δ}R^{δ}R^{δ}, where each R^{δ} is independently selected from substituted or unsubstituted alkyl, cycloalkyl, cycloheteroalkyl, alkoxy, aryl, heteroaryl, heteroarylalkyl, acyl, alkoxycarbonyl, sulfanyl, sulfinyl, sulfonyl, and the like. Typical amino groups include, but are limited to, dimethylamino, diethylamino, trimethylammonium, triethylammonium, methylysulfonylamino, furanyl-oxy-sulfamino, and the like.

[0098] As used herein, “oxo” refers to ═O.

[0099] As used herein, “oxy” refers to a divalent group —O—, which may have various substituents to form different oxy groups, including ethers and esters.

[0100] As used herein, “carboxy” refers to —COOH.

[0101] As used herein, “carbonyl” refers to —C(O)—, which may have a variety of substituents to form different carbonyl groups including acids, acid halides, aldehydes, amides, esters, and ketones.

[0102] As used herein, “alkyloxycarbonyl” refers to —C(O)OR^{ε}, where R^{ε} is an alkyl group as defined herein, which can be optionally substituted.

[0103] As used herein, “aminocarbonyl” refers to —C(O)NH₂. Substituted aminocarbonyl refers to —C(O)NR^{δ}R^{δ}, where the amino group NR^{δ}R^{δ} is as defined herein.

[0104] As used herein, “halogen” and “halo” refer to fluoro, chloro, bromo and iodo.

[0105] As used herein, “hydroxy” refers to —OH.

[0106] As used herein, “cyano” refers to —CN.

[0107] As used herein, “heteroaryl” refers to an aromatic heterocyclic group of from 1 to 10 carbon atoms inclusively and 1 to 4 heteroatoms inclusively selected from oxygen, nitrogen and sulfur within the ring. Such heteroaryl groups can have a single ring (e.g., pyridyl or furyl) or multiple condensed rings (e.g., indolizinyl or benzothienyl).

[0108] As used herein, “heteroarylalkyl” refers to an alkyl substituted with a heteroaryl (i.e., heteroaryl-alkyl-groups), preferably having from 1 to 6 carbon atoms inclusively in the alkyl moiety and from 5 to 12 ring atoms inclusively in the heteroaryl moiety. Such heteroarylalkyl groups are exemplified by pyridylmethyl and the like.

[0109] As used herein, “heteroarylalkenyl” refers to an alkenyl substituted with a heteroaryl (i.e., heteroaryl-alkenyl-groups), preferably having from 2 to 6 carbon atoms inclusively in the alkenyl moiety and from 5 to 12 ring atoms inclusively in the heteroaryl moiety.

[0110] As used herein, “heteroarylalkynyl” refers to an alkynyl substituted with a heteroaryl (i.e., heteroaryl-alkynyl-groups), preferably having from 2 to 6 carbon atoms inclusively in the alkynyl moiety and from 5 to 12 ring atoms inclusively in the heteroaryl moiety.

[0111] As used herein, “heterocycle,” “heterocyclic,” and interchangeably “heterocycloalkyl,” refer to a saturated or unsaturated group having a single ring or multiple condensed rings, from 2 to 10 carbon ring atoms inclusively and from 1 to 4 hetero ring atoms inclusively selected from nitrogen, sulfur or oxygen within the ring. Such heterocyclic groups can have a single ring (e.g., piperidinyl or tetrahydrofuryl) or multiple condensed rings (e.g., indolinyl, dihydrobenzofuran or quinuclidinyl). Examples of heterocycles include, but are not limited to, furan, thiophene, thiazole, oxazole, pyrrole, imidazole, pyrazole, pyridine, pyrazine, pyrimidine, pyridazine, indolizine, isoindole, indole, indazole, purine, quinolizine, isoquinoline, quinoline, phthalazine, naphthylpyridine, quinoxaline, quinazoline, cinnoline, pteridine, carbazole, carboline, phenanthridine, acridine, phenanthroline, isothiazole, phenazine, isoxazole, phenoxazine, phenothiazine, imidazolidine, imidazoline, piperidine, piperazine, pyrrolidine, indoline and the like.

[0112] As used herein, “membered ring” is meant to embrace any cyclic structure. The number preceding the term “membered” denotes the number of skeletal atoms that constitute the ring. Thus, for example, cyclohexyl, pyridine, pyran and thiopyran are 6-membered rings and cyclopentyl, pyrrole, furan, and thiophene are 5-membered rings.

[0113] Unless otherwise specified, positions occupied by hydrogen in the foregoing groups can be further substituted with substituents exemplified by, but not limited to, hydroxy, oxo, nitro, methoxy, ethoxy, alkoxy, substituted alkoxy, trifluoromethoxy, haloalkoxy, fluoro, chloro, bromo, iodo, halo, methyl, ethyl, propyl, butyl, alkyl, alkenyl, alkynyl, substituted alkyl, trifluoromethyl, haloalkyl, hydroxyalkyl, alkoxyalkyl, thio, alkylthio, acyl, carboxy, alkoxycarbonyl, carboxamido, substituted carboxamido, alkylsulfonyl, alkylsulfinyl, alkylsulfonylamino, sulfonamido, substituted sulfonamido, cyano, amino, substituted amino, alkylamino, dialkylamino, aminoalkyl, acylamino, amidino, amidoximo, hydroxamoyl, phenyl, aryl, substituted aryl, aryloxy, arylalkyl, arylalkenyl, arylalkynyl, pyridyl, imidazolyl, heteroaryl, substituted heteroaryl, heteroaryloxy, heteroarylalkyl, heteroarylalkenyl, heteroarylalkynyl, cyclopropyl, cyclobutyl, cyclopentyl, cyclohexyl, cycloalkyl, cycloalkenyl, cycloalkylalkyl, substituted cycloalkyl, cycloalkyloxy, pyrrolidinyl, piperidinyl, morpholino, heterocycle, (heterocycle)oxy, and (heterocycle)alkyl; and preferred heteroatoms are oxygen, nitrogen, and sulfur. It is understood that where open valences exist on these substituents they can be further substituted with alkyl, cycloalkyl, aryl, heteroaryl, and/or heterocycle groups, that where these open valences exist on carbon they can be further substituted by halogen and by oxygen-, nitrogen-, or sulfur-bonded substituents, and where multiple such open valences exist, these groups can be joined to form a ring, either by direct formation of a bond or by formation of bonds to a new heteroatom, preferably oxygen, nitrogen, or sulfur. It is further understood that the above substitutions can be made provided that replacing the hydrogen with the substituent does not introduce unacceptable instability to the molecules of the present invention and is otherwise chemically reasonable.

[0114] As used herein the term “culturing” refers to the growing of a population of microbial cells under any suitable conditions (e.g., using a liquid, gel or solid medium).

[0115] Recombinant polypeptides can be produced using any suitable methods known in the art. Genes encoding the wild-type polypeptide of interest can be cloned in vectors, such as plasmids, and expressed in desired hosts, such as E. coli, etc. Variants of recombinant polypeptides can be generated by various methods known in the art. Indeed, there is a wide variety of different mutagenesis techniques well known to those skilled in the art. In addition, mutagenesis kits are also available from many commercial molecular biology suppliers. Methods are available to make specific substitutions at defined amino acids (site-directed), specific or random mutations in a localized region of the gene (regio-specific), or random mutagenesis over the entire gene (e.g., saturation mutagenesis). Numerous suitable methods are known to those in the art to generate enzyme variants, including but not limited to site-directed mutagenesis of single-stranded DNA or double-stranded DNA using PCR, cassette mutagenesis, gene synthesis, error-prone PCR, shuffling, and chemical saturation mutagenesis, or any other suitable method known in the art. Mutagenesis and directed evolution methods can be readily applied to enzyme-encoding polynucleotides to generate variant libraries that can be expressed, screened, and assayed. Any suitable mutagenesis and directed evolution methods find use in the present invention and are well known in the art (See e.g., U.S. Pat. Nos. 5,605,793, 5,811,238, 5,830,721, 5,834,252, 5,837,458, 5,928,905, 6,096,548, 6,117,679, 6,132,970, 6,165,793, 6,180,406, 6,251,674, 6,265,201, 6,277,638, 6,287,861, 6,287,862, 6,291,242, 6,297,053, 6,303,344, 6,309,883, 6,319,713, 6,319,714, 6,323,030, 6,326,204, 6,335,160, 6,335,198, 6,344,356, 6,352,859, 6,355,484, 6,358,740, 6,358,742, 6,365,377, 6,365,408, 6,368,861, 6,372,497, 6,337,186, 6,376,246, 6,379,964, 6,387,702, 6,391,552, 6,391,640, 6,395,547, 6,406,855, 6,406,910, 6,413,745, 6,413,774, 6,420,175, 6,423,542, 6,426,224, 6,436,675, 6,444,468, 6,455,253, 6,479,652, 6,482,647, 6,483,011, 6,484,105, 6,489,146, 6,500,617, 6,500,639, 6,506,602, 6,506,603, 6,518,065, 6,519,065, 6,521,453, 6,528,311, 6,537,746, 6,573,098, 6,576,467, 6,579,678, 6,586,182, 6,602,986, 6,605,430, 6,613,514, 6,653,072, 6,686,515, 6,703,240, 6,716,631, 6,825,001, 6,902,922, 6,917,882, 6,946,296, 6,961,664, 6,995,017, 7,024,312, 7,058,515, 7,105,297, 7,148,054, 7,220,566, 7,288,375, 7,384,387, 7,421,347, 7,430,477, 7,462,469, 7,534,564, 7,620,500, 7,620,502, 7,629,170, 7,702,464, 7,747,391, 7,747,393, 7,751,986, 7,776,598, 7,783,428, 7,795,030, 7,853,410, 7,868,138, 7,783,428, 7,873,477, 7,873,499, 7,904,249, 7,957,912, 7,981,614, 8,014,961, 8,029,988, 8,048,674, 8,058,001, 8,076,138, 8,108,150, 8,170,806, 8,224,580, 8,377,681, 8,383,346, 8,457,903, 8,504,498, 8,589,085, 8,762,066, 8,768,871, 9,593,326, and all related US, as well as PCT and non-US counterparts; Ling et al., Anal. Biochem., 254(2):157-78 [1997]; Dale et al., Meth. Mol. Biol., 57:369-74 [1996]; Smith, Ann. Rev. Genet., 19:423-462 [1985]; Botstein et al., Science, 229:1193-1201 [1985]; Carter, Biochem. J., 237:1-7 [1986]; Kramer et al., Cell, 38:879-887 [1984]; Wells et al., Gene, 34:315-323 [1985]; Minshull et al., Curr. Op. Chem. Biol., 3:284-290 [1999]; Christians et al., Nat. Biotechnol., 17:259-264 [1999]; Crameri et al., Nature, 391:288-291 [1998]; Crameri, et al., Nat. Biotechnol., 15:436-438 [1997]; Zhang et al., Proc. Nat. Acad. Sci. U.S.A., 94:4504-4509 [1997]; Crameri et al., Nat. Biotechnol., 14:315-319 [1996]; Stemmer, Nature, 370:389-391 [1994]; Stemmer, Proc. Nat. Acad. Sci. USA, 91:10747-10751 [1994]; WO 95/22625; WO 97/0078; WO 97/35966; WO 98/27230; WO 00/42651; WO 01/75767; and WO 2009/152336, all of which are incorporated herein by reference).

[0116] In some embodiments, the enzyme clones obtained following mutagenesis treatment are screened by subjecting the enzyme preparations to a defined temperature (or other assay conditions) and measuring the amount of enzyme activity remaining after heat treatments or other suitable assay conditions. Clones containing a polynucleotide encoding a polypeptide are then isolated from the gene, sequenced to identify the nucleotide sequence changes (if any), and used to express the enzyme in a host cell. Measuring enzyme activity from the expression libraries can be performed using any suitable method known in the art (e.g., standard biochemistry techniques, such as HPLC analysis).

[0117] After the variants are produced, they can be screened for any desired property (e.g., high or increased activity, or low or reduced activity, increased thermal activity, increased thermal stability, and/or acidic pH stability, etc.). In some embodiments, “recombinant galactose oxidase polypeptides” (also referred to herein as “engineered galactose oxidase polypeptides,” “variant galactose oxidase enzymes,” “galactose oxidase variants,” and “galactose oxidase combinatorial variants”) find use. In some embodiments, “recombinant galactose oxidase polypeptides” (also referred to as “engineered galactose oxidase polypeptides,” “variant galactose oxidase enzymes,” “galactose oxidase variants,” and “galactose oxidase combinatorial variants”) find use.

[0118] As used herein, a “vector” is a DNA construct for introducing a DNA sequence into a cell. In some embodiments, the vector is an expression vector that is operably linked to a suitable control sequence capable of effecting the expression in a suitable host of the polypeptide encoded in the DNA sequence. In some embodiments, an “expression vector” has a promoter sequence operably linked to the DNA sequence (e.g., transgene) to drive expression in a host cell, and in some embodiments, also comprises a transcription terminator sequence.

[0119] As used herein, the term “expression” includes any step involved in the production of the polypeptide including, but not limited to, transcription, post-transcriptional modification, translation, and post-translational modification. In some embodiments, the term also encompasses secretion of the polypeptide from a cell.

[0120] As used herein, the term “produces” refers to the production of proteins and/or other compounds by cells. It is intended that the term encompass any step involved in the production of polypeptides including, but not limited to, transcription, post-transcriptional modification, translation, and post-translational modification. In some embodiments, the term also encompasses secretion of the polypeptide from a cell.

[0121] As used herein, an amino acid or nucleotide sequence (e.g., a promoter sequence, signal peptide, terminator sequence, etc.) is “heterologous” to another sequence with which it is operably linked if the two sequences are not associated in nature. For example, a “heterologous polynucleotide” is any polynucleotide that is introduced into a host cell by laboratory techniques and includes polynucleotides that are removed from a host cell, subjected to laboratory manipulation, and then reintroduced into a host cell.

[0122] As used herein, the terms “host cell” and “host strain” refer to suitable hosts for expression vectors comprising DNA provided herein (e.g., the polynucleotides encoding the galactose oxidase variants). In some embodiments, the host cells are prokaryotic or eukaryotic cells that have been transformed or transfected with vectors constructed using recombinant DNA techniques as known in the art.

[0123] The term “analogue” means a polypeptide having more than 70% sequence identity but less than 100% sequence identity (e.g., more than 75%, 78%, 80%, 83%, 85%, 88%, 90%, 91%, 92%, 93%, 94%, 95%, 96%, 97%, 98%, 99% sequence identity) with a reference polypeptide. In some embodiments, analogues means polypeptides that contain one or more non-naturally occurring amino acid residues including, but not limited, to homoarginine, ornithine and norvaline, as well as naturally occurring amino acids. In some embodiments, analogues also include one or more D-amino acid residues and non-peptide linkages between two or more amino acid residues.

[0124] The term “effective amount” means an amount sufficient to produce the desired result. One of general skill in the art may determine what the effective amount by using routine experimentation.

[0125] The terms “isolated” and “purified” are used to refer to a molecule (e.g., an isolated nucleic acid, polypeptide, etc.) or other component that is removed from at least one other component with which it is naturally associated. The term “purified” does not require absolute purity, rather it is intended as a relative definition.

[0126] As used herein, “stereoselectivity” refers to the preferential formation in a chemical or enzymatic reaction of one stereoisomer over another. Stereoselectivity can be partial, where the formation of one stereoisomer is favored over the other, or it may be complete where only one stereoisomer is formed. When the stereoisomers are enantiomers, the stereoselectivity is referred to as enantioselectivity, the fraction (typically reported as a percentage) of one enantiomer in the sum of both. It is commonly alternatively reported in the art (typically as a percentage) as the enantiomeric excess (“e.e.”) calculated therefrom according to the formula [major enantiomer—minor enantiomer]/[major enantiomer+minor enantiomer]. Where the stereoisomers are diastereoisomers, the stereoselectivity is referred to as diastereoselectivity, the fraction (typically reported as a percentage) of one diastereomer in a mixture of two diastereomers, commonly alternatively reported as the diastereomeric excess (“d.e.”). Enantiomeric excess and diastereomeric excess are types of stereomeric excess.

[0127] As used herein, “regioselectivity” and “regioselective reaction” refer to a reaction in which one direction of bond making or breaking occurs preferentially over all other possible directions. Reactions can completely (100%) regioselective if the discrimination is complete, substantially regioselective (at least 75%), or partially regioselective (x %, wherein the percentage is set dependent upon the reaction of interest), if the product of reaction at one site predominates over the product of reaction at other sites.

[0128] As used herein, “chemoselectivity” refers to the preferential formation in a chemical or enzymatic reaction of one product over another.

[0129] As used herein, “pH stable” refers to a galactose oxidase polypeptide that maintains similar activity (e.g., more than 60% to 80%) after exposure to high or low pH (e.g., 4.5-6 or 8 to 12) for a period of time (e.g., 0.5-24 hrs) compared to the untreated enzyme.

[0130] As used herein, “thermostable” refers to a galactose oxidase polypeptide that maintains similar activity (more than 60% to 80% for example) after exposure to elevated temperatures (e.g., 40-80° C.) for a period of time (e.g., 0.5-24 h) compared to the wild-type enzyme exposed to the same elevated temperature.

[0131] As used herein, “solvent stable” refers to a galactose oxidase polypeptide that maintains similar activity (more than e.g., 60% to 80%) after exposure to varying concentrations (e.g., 5-99%) of solvent (ethanol, isopropyl alcohol, dimethylsulfoxide [DMSO], tetrahydrofuran, 2-methyltetrahydrofuran, acetone, toluene, butyl acetate, methyl tert-butyl ether, etc.) for a period of time (e.g., 0.5-24 h) compared to the wild-type enzyme exposed to the same concentration of the same solvent.

[0132] As used herein, “thermo- and solvent stable” refers to a galactose oxidase polypeptide that is both thermostable and solvent stable.

[0133] As used herein, “optional” and “optionally” mean that the subsequently described event or circumstance may or may not occur, and that the description includes instances where the event or circumstance occurs and instances in which it does not. One of ordinary skill in the art would understand that with respect to any molecule described as containing one or more optional substituents, only sterically practical and/or synthetically feasible compounds are meant to be included.

[0134] As used herein, “optionally substituted” refers to all subsequent modifiers in a term or series of chemical groups. For example, in the term “optionally substituted arylalkyl, the “alkyl” portion and the “aryl” portion of the molecule may or may not be substituted, and for the series “optionally substituted alkyl, cycloalkyl, aryl and heteroaryl,” the alkyl, cycloalkyl, aryl, and heteroaryl groups, independently of the others, may or may not be substituted.

[0135] As used herein, “protecting group” refers to a group of atoms that mask, reduce or prevent the reactivity of the functional group when attached to a reactive functional group in a molecule. Typically, a protecting group may be selectively removed as desired during the course of a synthesis. Examples of protecting groups are well-known in the art. Functional groups that can have a protecting group include, but are not limited to, hydroxy, amino, and carboxy groups. Representative amino protecting groups include, but are not limited to, formyl, acetyl, trifluoroacetyl, benzyl, benzyloxycarbonyl (“CBZ”), tert-butoxycarbonyl (“Boc”), trimethylsilyl (“TMS”), 2-trimethylsilyl-ethanesulfonyl (“SES”), trityl and substituted trityl groups, allyloxycarbonyl, 9-fluorenylmethyloxycarbonyl (“FMOC”), nitro-veratryloxycarbonyl (“NVOC”) and the like. Representative hydroxyl protecting groups include, but are not limited to, those where the hydroxyl group is either acylated (e.g., methyl and ethyl esters, acetate or propionate groups or glycol esters) or alkylated such as benzyl and trityl ethers, as well as alkyl ethers, tetrahydropyranyl ethers, trialkylsilyl ethers (e.g., TMS or TIPPS groups) and allyl ethers. Other protecting groups can be found in the references noted herein.

### DETAILED DESCRIPTION OF THE INVENTION

[0136] The present invention provides engineered galactose oxidase (GOase) enzymes, polypeptides having GOase activity, and polynucleotides encoding these enzymes, as well as vectors and host cells comprising these polynucleotides and polypeptides. Methods for producing GOase enzymes are also provided. The present invention further provides compositions comprising the GOase enzymes and methods of using the engineered GOase enzymes. The present invention finds particular use in the production of pharmaceutical and other compounds.

[0137] Galactose oxidase (GOase) from F. graminearium is a naturally-occurring copper-dependent enzyme capable of performing oxidations on primary alcohol-containing substrates under mild reaction conditions. In addition to copper, the enzyme relies on a post-translationally formed cofactor, which is the result of the bound copper and molecular oxygen-mediated cross-linking of the active site residues tyrosine and cysteine. The enzyme is then active and capable of catalyzing the oxidation of primary alcohols by reducing oxygen and producing an aldehyde and hydrogen peroxide via a radical mechanism.

[chemical structure]

[0138] Previous directed evolution efforts were performed which focused on evolving a GOase variant with improved selectivity and activity on 3-ethynylglycerol (EGO) for generating the corresponding aldehyde. Variants that possessed enantioselectivity which favored formation of the R-enantiomer (See, Scheme 2) were produced.

[chemical structure]

[0139] Industrial process conditions may favor the oxidation of an alcohol-containing phosphorylated substrate, such as ethynyl glycerol phosphate (EGP), as compared to the primary alcohols of Schemes 1 and 2. Thus, further directed evolution efforts were performed which focused on evolving a GOase variant with improved activity on EGP for generating the corresponding phosphorylated aldehyde (Compound P) (See, Scheme 3).

[chemical structure]

[0140] Accordingly, the engineered GOase polypeptides of the present disclosure have improved oxidase activity on alcohol-containing substrates, including phosphorylated substrates, which may be useful in industrial processes and multi-enzyme systems.

### Engineered GOase Polypeptides

[0141] The present invention provides engineered GOase polypeptides, polynucleotides encoding the polypeptides, methods of preparing the polypeptides, and methods for using the polypeptides. Where the description relates to polypeptides, it is to be understood that it also describes the polynucleotides encoding the polypeptides. In some embodiments, the present invention provides engineered, non-naturally occurring GOase enzymes with improved properties as compared to wild-type GOase enzymes.

[0142] Any suitable reaction conditions find use in the present invention. In some embodiments, methods are used to analyze the improved properties of the engineered polypeptides to carry out the oxidation reaction. In some embodiments, the reaction conditions are modified with regard to concentrations or amounts of engineered GOase, substrate(s), buffer(s), solvent(s), co-factors, pH, conditions including temperature and reaction time, and/or conditions with the engineered GOase polypeptide immobilized on a solid support, as further described below and in the Examples.

[0143] In some embodiments, additional reaction components or additional techniques are utilized to supplement the reaction conditions. In some embodiments, these include taking measures to stabilize or prevent inactivation of the enzyme, reduce product inhibition, shift reaction equilibrium to desired product formation.

[0144] In some further embodiments, any of the above described processes for the conversion of substrate compound to product compound can further comprise one or more steps selected from: extraction, isolation, purification, crystallization, filtration, and/or lyophilization of product compound(s). Methods, techniques, and protocols for extracting, isolating, purifying, and/or crystallizing the product(s) from biocatalytic reaction mixtures produced by the processes provided herein are known to the ordinary artisan and/or accessed through routine experimentation. Additionally, illustrative methods are provided in the Examples below.

### Methods of Using the Engineered Galactose Oxidase Enzymes

[0145] In some embodiments, the GOase enzymes described herein find use in processes for converting ethynyl glycerol phosphate to Compound P. Generally, the process for performing the oxidation reaction comprises contacting or incubating the substrate compound in presence of one or more co-enzymes, such as horse radish peroxidase (HRP) and/or catalase.

[0146] In the embodiments provided herein and illustrated in the Examples, various ranges of suitable reaction conditions that can be used in the processes, include but are not limited to, substrate loading, co-substrate loading, reductant, divalent transition metal, pH, temperature, buffer, solvent system, polypeptide loading, and reaction time. Further suitable reaction conditions for carrying out the process for biocatalytic conversion of substrate compounds to product compounds using an engineered GOase polypeptide described herein can be readily optimized in view of the guidance provided herein by routine experimentation that includes, but is not limited to, contacting the engineered GOase polypeptide and substrate compound under experimental reaction conditions of concentration, pH, temperature, and solvent conditions, and detecting the product compound.

[0147] Substrate compound in the reaction mixtures can be varied, taking into consideration, for example, the desired amount of product compound, the effect of substrate concentration on enzyme activity, stability of enzyme under reaction conditions, and the percent conversion of substrate to product. In some embodiments, the suitable reaction conditions comprise a substrate compound loading of at least about 0.5 to about 200 g/L, 1 to about 200 g/L, 5 to about 150 g/L, about 10 to about 100 g/L, 20 to about 100 g/L or about 50 to about 100 g/L. In some embodiments, the suitable reaction conditions comprise a substrate compound loading of at least about 0.5 g/L, at least about 1 g/L, at least about 5 g/L, at least about 10 g/L, at least about 15 g/L, at least about 20 g/L, at least about 30 g/L, at least about 50 g/L, at least about 75 g/L, at least about 100 g/L, at least about 150 g/L or at least about 200 g/L, or even greater. The values for substrate loadings provided herein are based on the molecular weight of 2-ethynylglycerol phosphate; however, it also contemplated that the equivalent molar amounts of various alcohol or alcohol phosphate analogues also can be used in the process.

[0148] In carrying out the GOase mediated processes described herein, the engineered polypeptide may be added to the reaction mixture in the form of a purified enzyme, partially purified enzyme, whole cells transformed with gene(s) encoding the enzyme, as cell extracts and/or lysates of such cells, and/or as an enzyme immobilized on a solid support. Whole cells transformed with gene(s) encoding the engineered GOase enzyme or cell extracts, lysates thereof, and isolated enzymes may be employed in a variety of different forms, including solid (e.g., lyophilized, spray-dried, and the like) or semisolid (e.g., a crude paste). The cell extracts or cell lysates may be partially purified by precipitation (ammonium sulfate, polyethyleneimine, heat treatment or the like, followed by a desalting procedure prior to lyophilization (e.g., ultrafiltration, dialysis, etc.). Any of the enzyme preparations (including whole cell preparations) may be stabilized by crosslinking using known crosslinking agents, such as, for example, glutaraldehyde or immobilization to a solid phase (e.g., Eupergit C, and the like).

[0149] The gene(s) encoding the engineered GOase polypeptides can be transformed into host cells separately or together into the same host cell. For example, in some embodiments one set of host cells can be transformed with gene(s) encoding one engineered GOase polypeptide and another set can be transformed with gene(s) encoding another engineered GOase polypeptide. Both sets of transformed cells can be utilized together in the reaction mixture in the form of whole cells, or in the form of lysates or extracts derived therefrom. In other embodiments, a host cell can be transformed with gene(s) encoding multiple engineered GOase polypeptides. In some embodiments the engineered polypeptides can be expressed in the form of secreted polypeptides, and the culture medium containing the secreted polypeptides can be used for the GOase reaction.

[0150] In some embodiments, the improved activity and/or selectivity of the engineered GOase polypeptides disclosed herein provides for processes wherein higher percentage conversion can be achieved with lower concentrations of the engineered polypeptide. In some embodiments of the process, the suitable reaction conditions comprise an engineered polypeptide amount of about 0.03% (w/w), 0.05% (w/w), 0.1% (w/w), 0.15% (w/w), 0.2% (w/w), 0.3% (w/w), 0.4% (w/w), 0.5% (w/w), 1% (w/w), 2% (w/w), 5% (w/w), 10% (w/w), 20% (w/w) or more of substrate compound loading.

[0151] In some embodiments, the engineered polypeptide is present at about 0.01 g/L to about 15 g/L; about 0.05 g/L to about 15 g/L; about 0.1 g/L to about 10 g/L; about 1 g/L to about 8 g/L; about 0.5 g/L to about 10 g/L; about 1 g/L to about 10 g/L; about 0.1 g/L to about 5 g/L; about 0.5 g/L to about 5 g/L; or about 0.1 g/L to about 2 g/L. In some embodiments, the GOase polypeptide is present at about 0.15 g/L, 0.2 g/L, 0.5 g/L, 1 g/L, 2 g/L, 5 g/L, 10 g/L, or 12.5 g/L.

[0152] In some embodiments, the reaction conditions also comprise a metal capable of serving as a cofactor in the reaction. Generally, the metal co-factor is copper sulfate (i.e., CuSO₄). The magnesium ion may be provided in various forms. While copper ion functions efficiently in the engineered enzymes, it is to be understood that other metals capable of acting as a co-factor can be used in the processes. In some embodiments, the reaction conditions can comprises a metal cofactor, particularly CuSO₄, at a concentration of about 0.1 mM to 1 mM, 1 mM to 1 M, 1 mM to 100 mM, 1 mM to about 50 mM, 25 mM to about 35 mM, about 30 mM to about 60 mM or about 55 mM to about 65 mM. In some embodiments, the reaction conditions comprise a metal co-factor concentration of about 0.1 mM, 1 mM, 10 mM, 20 mM, 30 mM, 40 mM, 50 mM, 60 mM, 70 mM, 80 mM, 90 mM, or 100 mM.

[0153] During the course of the reaction, the pH of the reaction mixture may change. The pH of the reaction mixture may be maintained at a desired pH or within a desired pH range. This may be done by the addition of an acid or a base, before and/or during the course of the reaction. Alternatively, the pH may be controlled by using a buffer. Accordingly, in some embodiments, the reaction condition comprises a buffer. Suitable buffers to maintain desired pH ranges are known in the art and include, by way of example and not limitation, borate, phosphate, 2-(N-morpholino)ethanesulfonic acid (MES), 3-(N-morpholino)propanesulfonic acid (MOPS), acetate, triethanolamine, and 2-amino-2-hydroxymethyl-propane-1,3-diol (Tris), and the like. In some embodiments, the buffer is tris. In some embodiments, the buffer is bis-tris methane (BIS-TRIS). In some embodiments of the process, the suitable reaction conditions comprise a buffer (e.g., BIS-TRIS) concentration of from about 0.01 to about 0.4 M, 0.05 to about 0.4 M, 0.1 to about 0.3 M, or about 0.1 to about 0.2 M. In some embodiments, the reaction condition comprises a buffer (e.g., tris) concentration of about 0.01, 0.02, 0.03, 0.04, 0.05, 0.07, 0.1, 0.12, 0.14, 0.16, 0.18, 0.2, 0.3, or 0.4 M.

[0154] In the embodiments of the process, the reaction conditions can comprise a suitable pH. The desired pH or desired pH range can be maintained by use of an acid or base, an appropriate buffer, or a combination of buffering and acid or base addition. The pH of the reaction mixture can be controlled before and/or during the course of the reaction. In some embodiments, the suitable reaction conditions comprise a solution pH from about 4 to about 10, pH from about 5 to about 10, pH from about 5 to about 9, pH from about 6 to about 9, pH from about 6 to about 8. In some embodiments, the reaction conditions comprise a solution pH of about 4, 4.5, 5, 5.5, 6, 6.5, 7, 7.5, 8, 8.5, 9, 9.5, or 10.

[0155] In the embodiments of the processes herein, a suitable temperature can be used for the reaction conditions, for example, taking into consideration the increase in reaction rate at higher temperatures, and the activity of the enzyme during the reaction time period. Accordingly, in some embodiments, the suitable reaction conditions comprise a temperature of about 10° C. to about 60° C., about 10° C. to about 55° C., about 15° C. to about 60° C., about 20° C. to about 60° C., about 20° C. to about 55° C., about 25° C. to about 55° C., or about 30° C. to about 50° C. In some embodiments, the suitable reaction conditions comprise a temperature of about 10° C., 15° C., 20° C., 25° C., 30° C., 35° C., 40° C., 45° C., 50° C., 55° C., or 60° C. In some embodiments, the temperature during the enzymatic reaction can be maintained at a specific temperature throughout the course of the reaction. In some embodiments, the temperature during the enzymatic reaction can be adjusted over a temperature profile during the course of the reaction.

[0156] In some embodiments, the reaction conditions can comprise a surfactant for stabilizing or enhancing the reaction. Surfactants can comprise non-ionic, cationic, anionic and/or amphiphilic surfactants. Exemplary surfactants, include by way of example and not limitation, nonyl phenoxypolyethoxylethanol (NP40), Triton X-100, polyoxyethylene-stearylamine, cetyltrimethylammonium bromide, sodium oleylamidosulfate, polyoxyethylene-sorbitanmonostearate, hexadecyldimethylamine, etc. Any surfactant that may stabilize or enhance the reaction may be employed. The concentration of the surfactant to be employed in the reaction may be generally from 0.1 to 50 mg/ml, particularly from 1 to 20 mg/ml.

[0157] In some embodiments, the reaction conditions can include an antifoam agent, which aids in reducing or preventing formation of foam in the reaction solution, such as when the reaction solutions are mixed or sparged. Anti-foam agents include non-polar oils (e.g., minerals, silicones, etc.), polar oils (e.g., fatty acids, alkyl amines, alkyl amides, alkyl sulfates, etc.), and hydrophobic (e.g., treated silica, polypropylene, etc.), some of which also function as surfactants. Exemplary anti-foam agents include, Y-30® (Dow Corning), poly-glycol copolymers, oxy/ethoxylated alcohols, and polydimethylsiloxanes. In some embodiments, the anti-foam can be present at about 0.001% (v/v) to about 5% (v/v), about 0.01% (v/v) to about 5% (v/v), about 0.1% (v/v) to about 5% (v/v), or about 0.1% (v/v) to about 2% (v/v). In some embodiments, the anti-foam agent can be present at about 0.001% (v/v), about 0.01% (v/v), about 0.1% (v/v), about 0.5% (v/v), about 1% (v/v), about 2% (v/v), about 3% (v/v), about 4% (v/v), or about 5% (v/v) or more as desirable to promote the reaction.

[0158] The quantities of reactants used in the oxidase reaction will generally vary depending on the quantities of product desired, and concomitantly the amount of GOase substrate employed. Those having ordinary skill in the art will readily understand how to vary these quantities to tailor them to the desired level of productivity and scale of production.

[0159] In some embodiments, the order of addition of reactants is not critical. The reactants may be added together at the same time to a solvent (e.g., monophasic solvent, biphasic aqueous co-solvent system, and the like), or alternatively, some of the reactants may be added separately, and some together at different time points. For example, the cofactor, co-substrate, GOase enzyme, and substrate may be added first to the solvent.

[0160] The solid reactants (e.g., enzyme, salts, etc.) may be provided to the reaction in a variety of different forms, including powder (e.g., lyophilized, spray dried, and the like), solution, emulsion, suspension, and the like. The reactants can be readily lyophilized or spray dried using methods and equipment that are known to those having ordinary skill in the art. For example, the protein solution can be frozen at −80° C. in small aliquots, then added to a pre-chilled lyophilization chamber, followed by the application of a vacuum.

[0161] For improved mixing efficiency when an aqueous co-solvent system is used, the GOase enzyme, and cofactor may be added and mixed into the aqueous phase first. The organic phase may then be added and mixed in, followed by addition of the GOase enzyme substrate and co-enzymes. Alternatively, the GOase enzyme substrate may be premixed in the organic phase, prior to addition to the aqueous phase.

[0162] The oxidation process is generally allowed to proceed until further conversion of substrate to product does not change significantly with reaction time (e.g., less than 10% of substrate being converted, or less than 5% of substrate being converted). In some embodiments, the reaction is allowed to proceed until there is complete or near complete conversion of substrate to product. Transformation of substrate to product can be monitored using known methods by detecting substrate and/or product, with or without derivatization. Suitable analytical methods include gas chromatography, HPLC, MS, and the like.

[0163] In some embodiments of the process, the suitable reaction conditions comprise a substrate loading of at least about 5 g/L, 10 g/L, 20 g/L, 30 g/L, 40 g/L, 50 g/L, 60 g/L, and wherein the method results in at least about 50%, 60%, 70%, 80%, 90%, 95% or greater conversion of substrate compound to product compound in about 48 h or less, in about 36 h or less, in about 24 h or less, or in about 3 h or less.

[0164] In further embodiments of the processes for converting substrate compound to product compound using the engineered GOase polypeptides, the suitable reaction conditions can comprise an initial substrate loading to the reaction solution which is then contacted by the polypeptide. This reaction solution is then further supplemented with additional substrate compound as a continuous or batchwise addition over time at a rate of at least about 1 g/L/h, at least about 2 g/L/h, at least about 4 g/L/h, at least about 6 g/L/h, or higher. Thus, according to these suitable reaction conditions, polypeptide is added to a solution having an initial substrate loading of at least about 20 g/L, 30 g/L, or 40 g/L. This addition of polypeptide is then followed by continuous addition of further substrate to the solution at a rate of about 2 g/L/h, 4 g/L/h, or 6 g/L/h until a much higher final substrate loading of at least about 30 g/L, 40 g/L, 50 g/L, 60 g/L, 70 g/L, 100 g/L, 150 g/L, 200 g/L or more, is reached. Accordingly, in some embodiments of the process, the suitable reaction conditions comprise addition of the polypeptide to a solution having an initial substrate loading of at least about 20 g/L, 30 g/L, or 40 g/L followed by addition of further substrate to the solution at a rate of about 2 g/L/h, 4 g/L/h, or 6 g/L/h until a final substrate loading of at least about 30 g/L, 40 g/L, 50 g/L, 60 g/L, 70 g/L, 100 g/L or more, is reached. This substrate supplementation reaction condition allows for higher substrate loadings to be achieved while maintaining high rates of conversion of substrate to product of at least about 50%, 60%, 70%, 80%, 90% or greater conversion of substrate.

[0165] In some embodiments, catalase recycles hydrogen peroxide (H₂O₂) to molecular oxygen (O₂). In some embodiments, horse radish peroxidase (HRP) is used to activate GOase.

[0166] In some embodiments of the processes, the reaction using an engineered GOase polypeptide can comprise the following suitable reaction conditions: (a) substrate loading at about 50 g/L; (b) about 0.15 g/L of the engineered polypeptide; (c) about 1 g/L HRP; (d) about 0.2 g/L catalase; (e) about 100 μM CuSO₄; (f) about 50 mM Bis-Tris; (g) a pH of about 7.5; (h) temperature of about 30° C.; and (i) reaction time of about 18-20 hrs.

[0167] In some embodiments, additional reaction components or additional techniques are carried out to supplement the reaction conditions. These can include taking measures to stabilize or prevent inactivation of the enzyme, reduce product inhibition, shift reaction equilibrium to product formation.

[0168] In further embodiments, any of the above described process for the conversion of substrate compound to product compound can further comprise one or more steps selected from: extraction; isolation; purification; and crystallization of product compound. Methods, techniques, and protocols for extracting, isolating, purifying, and/or crystallizing the product from biocatalytic reaction mixtures produced by the above disclosed processes are known to the ordinary artisan and/or accessed through routine experimentation. Additionally, illustrative methods are provided in the Examples below.

[0169] Various features and embodiments of the invention are illustrated in the following representative examples, which are intended to be illustrative, and not limiting.

### Engineered GOase Polynucleotides Encoding Engineered Polypeptides, Expression Vectors and Host Cells

[0170] The present invention provides polynucleotides encoding the engineered enzyme polypeptides described herein. In some embodiments, the polynucleotides are operatively linked to one or more heterologous regulatory sequences that control gene expression to create a recombinant polynucleotide capable of expressing the polypeptide. In some embodiments, expression constructs containing at least one heterologous polynucleotide encoding the engineered enzyme polypeptide(s) is introduced into appropriate host cells to express the corresponding enzyme polypeptide(s).

[0171] As will be apparent to the skilled artisan, availability of a protein sequence and the knowledge of the codons corresponding to the various amino acids provide a description of all the polynucleotides capable of encoding the subject polypeptides. The degeneracy of the genetic code, where the same amino acids are encoded by alternative or synonymous codons, allows an extremely large number of nucleic acids to be made, all of which encode an engineered enzyme (e.g., GOase) polypeptide. Thus, the present invention provides methods and compositions for the production of each and every possible variation of enzyme polynucleotides that could be made that encode the enzyme polypeptides described herein by selecting combinations based on the possible codon choices, and all such variations are to be considered specifically disclosed for any polypeptide described herein, including the amino acid sequences presented in the Examples (e.g., in the various Tables).

[0172] In some embodiments, the codons are preferably optimized for utilization by the chosen host cell for protein production. For example, preferred codons used in bacteria are typically used for expression in bacteria. Consequently, codon optimized polynucleotides encoding the engineered enzyme polypeptides contain preferred codons at about 40%, 50%, 60%, 70%, 80%, 90%, or greater than 90% of the codon positions in the full length coding region.

[0173] In some embodiments, the enzyme polynucleotide encodes an engineered polypeptide having enzyme activity with the properties disclosed herein, wherein the polypeptide comprises an amino acid sequence having at least 60%, 65%, 70%, 75%, 80%, 85%, 86%, 87%, 88%, 89%, 90%, 91%, 92%, 93%, 94%, 95%, 96%, 97%, 98%, 99% or more identity to a reference sequence selected from the SEQ ID NOS provided herein, or the amino acid sequence of any variant (e.g., those provided in the Examples), and one or more residue differences as compared to the reference polynucleotide(s), or the amino acid sequence of any variant as disclosed in the Examples (for example 1, 2, 3, 4, 5, 6, 7, 8, 9, 10 or more amino acid residue positions). In some embodiments, the reference polypeptide sequence is selected from SEQ ID NO: 4, 6, 38, 50, 114, 226, and/or 262.

[0174] In some embodiments, the polynucleotides are capable of hybridizing under highly stringent conditions to a reference polynucleotide sequence selected from any polynucleotide sequence provided herein, or a complement thereof, or a polynucleotide sequence encoding any of the variant enzyme polypeptides provided herein. In some embodiments, the polynucleotide capable of hybridizing under highly stringent conditions encodes an enzyme polypeptide comprising an amino acid sequence that has one or more residue differences as compared to a reference sequence.

[0175] In some embodiments, an isolated polynucleotide encoding any of the engineered enzyme polypeptides herein is manipulated in a variety of ways to facilitate expression of the enzyme polypeptide. In some embodiments, the polynucleotides encoding the enzyme polypeptides comprise expression vectors where one or more control sequences is present to regulate the expression of the enzyme polynucleotides and/or polypeptides. Manipulation of the isolated polynucleotide prior to its insertion into a vector may be desirable or necessary depending on the expression vector utilized. Techniques for modifying polynucleotides and nucleic acid sequences utilizing recombinant DNA methods are well known in the art. In some embodiments, the control sequences include among others, promoters, leader sequences, polyadenylation sequences, propeptide sequences, signal peptide sequences, and transcription terminators. In some embodiments, suitable promoters are selected based on the host cells selection. For bacterial host cells, suitable promoters for directing transcription of the nucleic acid constructs of the present disclosure, include, but are not limited to promoters obtained from the E. coli lac operon, Streptomyces coelicolor agarase gene (dagA), Bacillus subtilis levansucrase gene (sacB), Bacillus licheniformis alpha-amylase gene (amyL), Bacillus stearothermophilus maltogenic amylase gene (amyM), Bacillus amyloliquefaciens alpha-amylase gene (amyQ), Bacillus licheniformis penicillinase gene (penP), Bacillus subtilis xylA and xylB genes, and prokaryotic beta-lactamase gene (See e.g., Villa-Kamaroff et al., Proc. Natl Acad. Sci. USA 75: 3727-3731 [1978]), as well as the tac promoter (See e.g., DeBoer et al., Proc. Natl Acad. Sci. USA 80: 21-25 [1983]). Exemplary promoters for filamentous fungal host cells, include, but are not limited to promoters obtained from the genes for Aspergillus oryzae TAKA amylase, Rhizomucor miehei aspartic proteinase, Aspergillus niger neutral alpha-amylase, Aspergillus niger acid stable alpha-amylase, Aspergillus niger or Aspergillus awamori glucoamylase (glaA), Rhizomucor miehei lipase, Aspergillus oryzae alkaline protease, Aspergillus oryzae triose phosphate isomerase, Aspergillus nidulans acetamidase, and Fusarium oxysporum trypsin-like protease (See e.g., WO 96/00787), as well as the NA2-tpi promoter (a hybrid of the promoters from the genes for Aspergillus niger neutral alpha-amylase and Aspergillus oryzae triose phosphate isomerase), and mutant, truncated, and hybrid promoters thereof. Exemplary yeast cell promoters can be from the genes can be from the genes for Saccharomyces cerevisiae enolase (ENO-1), Saccharomyces cerevisiae galactokinase (GAL1), Saccharomyces cerevisiae alcohol dehydrogenase/glyceraldehyde-3-phosphate dehydrogenase (ADH2/GAP), and Saccharomyces cerevisiae 3-phosphoglycerate kinase. Other useful promoters for yeast host cells are known in the art (See e.g., Romanos et al., Yeast 8:423-488 [1992]).

[0176] In some embodiments, the control sequence is also a suitable transcription terminator sequence (i.e., a sequence recognized by a host cell to terminate transcription). In some embodiments, the terminator sequence is operably linked to the 3′ terminus of the nucleic acid sequence encoding the enzyme polypeptide. Any suitable terminator which is functional in the host cell of choice finds use in the present invention. Exemplary transcription terminators for filamentous fungal host cells can be obtained from the genes for Aspergillus oryzae TAKA amylase, Aspergillus niger glucoamylase, Aspergillus nidulans anthranilate synthase, Aspergillus niger alpha-glucosidase, and Fusarium oxysporum trypsin-like protease. Exemplary terminators for yeast host cells can be obtained from the genes for Saccharomyces cerevisiae enolase, Saccharomyces cerevisiae cytochrome C (CYC1), and Saccharomyces cerevisiae glyceraldehyde-3-phosphate dehydrogenase. Other useful terminators for yeast host cells are known in the art (See e.g., Romanos et al., supra).

[0177] In some embodiments, the control sequence is also a suitable leader sequence (i.e., anon-translated region of an mRNA that is important for translation by the host cell). In some embodiments, the leader sequence is operably linked to the 5′ terminus of the nucleic acid sequence encoding the enzyme polypeptide. Any suitable leader sequence that is functional in the host cell of choice find use in the present invention. Exemplary leaders for filamentous fungal host cells are obtained from the genes for Aspergillus oryzae TAKA amylase, and Aspergillus nidulans triose phosphate isomerase. Suitable leaders for yeast host cells are obtained from the genes for Saccharomyces cerevisiae enolase (ENO-1), Saccharomyces cerevisiae 3-phosphoglycerate kinase, Saccharomyces cerevisiae alpha-factor, and Saccharomyces cerevisiae alcohol dehydrogenase/glyceraldehyde-3-phosphate dehydrogenase (ADH2/GAP).

[0178] In some embodiments, the control sequence is also a polyadenylation sequence (i.e., a sequence operably linked to the 3′ terminus of the nucleic acid sequence and which, when transcribed, is recognized by the host cell as a signal to add polyadenosine residues to transcribed mRNA). Any suitable polyadenylation sequence which is functional in the host cell of choice finds use in the present invention. Exemplary polyadenylation sequences for filamentous fungal host cells include, but are not limited to the genes for Aspergillus oryzae TAKA amylase, Aspergillus niger glucoamylase, Aspergillus nidulans anthranilate synthase, Fusarium oxysporum trypsin-like protease, and Aspergillus niger alpha-glucosidase. Useful polyadenylation sequences for yeast host cells are known (See e.g., Guo and Sherman, Mol. Cell. Biol., 15:5983-5990 [1995]).

[0179] In some embodiments, the control sequence is also a signal peptide (i.e., a coding region that codes for an amino acid sequence linked to the amino terminus of a polypeptide and directs the encoded polypeptide into the cell's secretory pathway). In some embodiments, the 5′ end of the coding sequence of the nucleic acid sequence inherently contains a signal peptide coding region naturally linked in translation reading frame with the segment of the coding region that encodes the secreted polypeptide. Alternatively, in some embodiments, the 5′ end of the coding sequence contains a signal peptide coding region that is foreign to the coding sequence. Any suitable signal peptide coding region which directs the expressed polypeptide into the secretory pathway of a host cell of choice finds use for expression of the engineered polypeptide(s). Effective signal peptide coding regions for bacterial host cells are the signal peptide coding regions include, but are not limited to those obtained from the genes for Bacillus NC1B 11837 maltogenic amylase, Bacillus stearothermophilus alpha-amylase, Bacillus licheniformis subtilisin, Bacillus licheniformis beta-lactamase, Bacillus stearothermophilus neutral proteases (nprT, nprS, nprM), and Bacillus subtilis prsA. Further signal peptides are known in the art (See e.g., Simonen and Palva, Microbiol. Rev., 57:109-137 [1993]). In some embodiments, effective signal peptide coding regions for filamentous fungal host cells include, but are not limited to the signal peptide coding regions obtained from the genes for Aspergillus oryzae TAKA amylase, Aspergillus niger neutral amylase, Aspergillus niger glucoamylase, Rhizomucor miehei aspartic proteinase, Humicola insolens cellulase, and Humicola lanuginosa lipase. Useful signal peptides for yeast host cells include, but are not limited to those from the genes for Saccharomyces cerevisiae alpha-factor and Saccharomyces cerevisiae invertase.

[0180] In some embodiments, the control sequence is also a propeptide coding region that codes for an amino acid sequence positioned at the amino terminus of a polypeptide. The resultant polypeptide is referred to as a “proenzyme,” “propolypeptide,” or “zymogen.” A propolypeptide can be converted to a mature active polypeptide by catalytic or autocatalytic cleavage of the propeptide from the propolypeptide. The propeptide coding region may be obtained from any suitable source, including, but not limited to the genes for Bacillus subtilis alkaline protease (aprE), Bacillus subtilis neutral protease (nprT), Saccharomyces cerevisiae alpha-factor, Rhizomucor miehei aspartic proteinase, and Myceliophthora thermophila lactase (See e.g., WO 95/33836). Where both signal peptide and propeptide regions are present at the amino terminus of a polypeptide, the propeptide region is positioned next to the amino terminus of a polypeptide and the signal peptide region is positioned next to the amino terminus of the propeptide region.

[0181] In some embodiments, regulatory sequences are also utilized. These sequences facilitate the regulation of the expression of the polypeptide relative to the growth of the host cell. Examples of regulatory systems are those that cause the expression of the gene to be turned on or off in response to a chemical or physical stimulus, including the presence of a regulatory compound. In prokaryotic host cells, suitable regulatory sequences include, but are not limited to the lac, tac, and trp operator systems. In yeast host cells, suitable regulatory systems include, but are not limited to the ADH2 system or GAL1 system. In filamentous fungi, suitable regulatory sequences include, but are not limited to the TAKA alpha-amylase promoter, Aspergillus niger glucoamylase promoter, and Aspergillus oryzae glucoamylase promoter.

[0182] In another aspect, the present invention is directed to a recombinant expression vector comprising a polynucleotide encoding an engineered enzyme polypeptide, and one or more expression regulating regions such as a promoter and a terminator, a replication origin, etc., depending on the type of hosts into which they are to be introduced. In some embodiments, the various nucleic acid and control sequences described herein are joined together to produce recombinant expression vectors which include one or more convenient restriction sites to allow for insertion or substitution of the nucleic acid sequence encoding the enzyme polypeptide at such sites. Alternatively, in some embodiments, the nucleic acid sequence of the present invention is expressed by inserting the nucleic acid sequence or a nucleic acid construct comprising the sequence into an appropriate vector for expression. In some embodiments involving the creation of the expression vector, the coding sequence is located in the vector so that the coding sequence is operably linked with the appropriate control sequences for expression.

[0183] The recombinant expression vector may be any suitable vector (e.g., a plasmid or virus), that can be conveniently subjected to recombinant DNA procedures and bring about the expression of the enzyme polynucleotide sequence. The choice of the vector typically depends on the compatibility of the vector with the host cell into which the vector is to be introduced. The vectors may be linear or closed circular plasmids.

[0184] In some embodiments, the expression vector is an autonomously replicating vector (i.e., a vector that exists as an extra-chromosomal entity, the replication of which is independent of chromosomal replication, such as a plasmid, an extra-chromosomal element, a minichromosome, or an artificial chromosome). The vector may contain any means for assuring self-replication. In some alternative embodiments, the vector is one in which, when introduced into the host cell, it is integrated into the genome and replicated together with the chromosome(s) into which it has been integrated. Furthermore, in some embodiments, a single vector or plasmid, or two or more vectors or plasmids which together contain the total DNA to be introduced into the genome of the host cell, and/or a transposon is utilized.

[0185] In some embodiments, the expression vector contains one or more selectable markers, which permit easy selection of transformed cells. A “selectable marker” is a gene, the product of which provides for biocide or viral resistance, resistance to heavy metals, prototrophy to auxotrophs, and the like. Examples of bacterial selectable markers include, but are not limited to the dal genes from Bacillus subtilis or Bacillus licheniformis, or markers, which confer antibiotic resistance such as ampicillin, kanamycin, chloramphenicol or tetracycline resistance. Suitable markers for yeast host cells include, but are not limited to ADE2, HIS3, LEU2, LYS2, MET3, TRP1, and URA3. Selectable markers for use in filamentous fungal host cells include, but are not limited to, amdS (acetamidase; e.g., from A. nidulans or A. orzyae), argB (ornithine carbamoyltransferases), bar (phosphinothricin acetyltransferase; e.g., from S. hygroscopicus), hph (hygromycin phosphotransferase), niaD (nitrate reductase), pyrG (orotidine-5′-phosphate decarboxylase; e.g., from A. nidulans or A. orzyae), sC (sulfate adenyltransferase), and trpC (anthranilate synthase), as well as equivalents thereof.

[0186] In another aspect, the present invention provides a host cell comprising at least one polynucleotide encoding at least one engineered enzyme polypeptide of the present invention, the polynucleotide(s) being operatively linked to one or more control sequences for expression of the engineered enzyme enzyme(s) in the host cell. Host cells suitable for use in expressing the polypeptides encoded by the expression vectors of the present invention are well known in the art and include but are not limited to, bacterial cells, such as E. coli, Vibrio fluvialis, Streptomyces and Salmonella typhimurium cells; fungal cells, such as yeast cells (e.g., Saccharomyces cerevisiae or Pichia pastoris (ATCC Accession No. 201178)); insect cells such as Drosophila S2 and Spodoptera Sf9 cells; animal cells such as CHO, COS, BHK, 293, and Bowes melanoma cells; and plant cells. Exemplary host cells also include various Escherichia coli strains (e.g., W3110 (ΔfhuA) and BL21). Examples of bacterial selectable markers include, but are not limited to the dal genes from Bacillus subtilis or Bacillus licheniformis, or markers, which confer antibiotic resistance such as ampicillin, kanamycin, chloramphenicol, and or tetracycline resistance.

[0187] In some embodiments, the expression vectors of the present invention contain an element(s) that permits integration of the vector into the host cell's genome or autonomous replication of the vector in the cell independent of the genome. In some embodiments involving integration into the host cell genome, the vectors rely on the nucleic acid sequence encoding the polypeptide or any other element of the vector for integration of the vector into the genome by homologous or nonhomologous recombination.

[0188] In some alternative embodiments, the expression vectors contain additional nucleic acid sequences for directing integration by homologous recombination into the genome of the host cell. The additional nucleic acid sequences enable the vector to be integrated into the host cell genome at a precise location(s) in the chromosome(s). To increase the likelihood of integration at a precise location, the integrational elements preferably contain a sufficient number of nucleotides, such as 100 to 10,000 base pairs, preferably 400 to 10,000 base pairs, and most preferably 800 to 10,000 base pairs, which are highly homologous with the corresponding target sequence to enhance the probability of homologous recombination. The integrational elements may be any sequence that is homologous with the target sequence in the genome of the host cell. Furthermore, the integrational elements may be non-encoding or encoding nucleic acid sequences. On the other hand, the vector may be integrated into the genome of the host cell by non-homologous recombination.

[0189] For autonomous replication, the vector may further comprise an origin of replication enabling the vector to replicate autonomously in the host cell in question. Examples of bacterial origins of replication are P15A on or the origins of replication of plasmids pBR322, pUC19, pACYC177 (which plasmid has the P15A ori), or pACYC184 permitting replication in E. coli, and pUB110, pE194, or pTA1060 permitting replication in Bacillus. Examples of origins of replication for use in a yeast host cell are the 2 micron origin of replication, ARS1, ARS4, the combination of ARS1 and CEN3, and the combination of ARS4 and CEN6. The origin of replication may be one having a mutation which makes it's functioning temperature-sensitive in the host cell (See e.g., Ehrlich, Proc. Natl. Acad. Sci. USA 75:1433 [1978]).

[0190] In some embodiments, more than one copy of a nucleic acid sequence of the present invention is inserted into the host cell to increase production of the gene product. An increase in the copy number of the nucleic acid sequence can be obtained by integrating at least one additional copy of the sequence into the host cell genome or by including an amplifiable selectable marker gene with the nucleic acid sequence where cells containing amplified copies of the selectable marker gene, and thereby additional copies of the nucleic acid sequence, can be selected for by cultivating the cells in the presence of the appropriate selectable agent.

[0191] Many of the expression vectors for use in the present invention are commercially available. Suitable commercial expression vectors include, but are not limited to the p3xFLAGTM™ expression vectors (Sigma-Aldrich Chemicals), which include a CMV promoter and hGH polyadenylation site for expression in mammalian host cells and a pBR322 origin of replication and ampicillin resistance markers for amplification in E. coli. Other suitable expression vectors include, but are not limited to pBluescriptII SK(−) and pBK-CMV (Stratagene), and plasmids derived from pBR322 (Gibco BRL), pUC (Gibco BRL), pREP4, pCEP4 (Invitrogen) or pPoly (See e.g., Lathe et al., Gene 57:193-201 [1987]).

[0192] Thus, in some embodiments, a vector comprising a sequence encoding at least one variant galactose oxidase is transformed into a host cell in order to allow propagation of the vector and expression of the variant galactose oxidase(s). In some embodiments, the variant galactose oxidases are post-translationally modified to remove the signal peptide and in some cases may be cleaved after secretion. In some embodiments, the transformed host cell described above is cultured in a suitable nutrient medium under conditions permitting the expression of the variant galactose oxidase(s). Any suitable medium useful for culturing the host cells finds use in the present invention, including, but not limited to minimal or complex media containing appropriate supplements. In some embodiments, host cells are grown in HTP media. Suitable media are available from various commercial suppliers or may be prepared according to published recipes (e.g., in catalogues of the American Type Culture Collection).

[0193] In another aspect, the present invention provides host cells comprising a polynucleotide encoding an improved galactose oxidase polypeptide provided herein, the polynucleotide being operatively linked to one or more control sequences for expression of the galactose oxidase enzyme in the host cell. Host cells for use in expressing the galactose oxidase polypeptides encoded by the expression vectors of the present invention are well known in the art and include but are not limited to, bacterial cells, such as E. coli, Bacillus megaterium, Lactobacillus kefir, Streptomyces and Salmonella typhimurium cells; fungal cells, such as yeast cells (e.g., Saccharomyces cerevisiae or Pichia pastoris (ATCC Accession No. 201178)); insect cells such as Drosophila S2 and Spodoptera Sf9 cells; animal cells such as CHO, COS, BHK, 293, and Bowes melanoma cells; and plant cells. Appropriate culture media and growth conditions for the above-described host cells are well known in the art.

[0194] Polynucleotides for expression of the galactose oxidase may be introduced into cells by various methods known in the art. Techniques include among others, electroporation, biolistic particle bombardment, liposome mediated transfection, calcium chloride transfection, and protoplast fusion. Various methods for introducing polynucleotides into cells are known to those skilled in the art.

[0195] In some embodiments, the host cell is a eukaryotic cell. Suitable eukaryotic host cells include, but are not limited to, fungal cells, algal cells, insect cells, and plant cells. Suitable fungal host cells include, but are not limited to, Ascomycota, Basidiomycota, Deuteromycota, Zygomycota, Fungi imperfecti. In some embodiments, the fungal host cells are yeast cells and filamentous fungal cells. The filamentous fungal host cells of the present invention include all filamentous forms of the subdivision Eumycotina and Oomycota. Filamentous fungi are characterized by a vegetative mycelium with a cell wall composed of chitin, cellulose and other complex polysaccharides. The filamentous fungal host cells of the present invention are morphologically distinct from yeast.

[0196] In some embodiments of the present invention, the filamentous fungal host cells are of any suitable genus and species, including, but not limited to Achlya, Acremonium, Aspergillus, Aureobasidium, Bjerkandera, Ceriporiopsis, Cephalosporium, Chrysosporium, Cochliobolus, Corynascus, Cryphonectria, Cryptococcus, Coprinus, Coriolus, Diplodia, Endothis, Fusarium, Gibberella, Gliocladium, Humicola, Hypocrea, Myceliophthora, Mucor, Neurospora, Penicillium, Podospora, Phlebia, Piromyces, Pyricularia, Rhizomucor, Rhizopus, Schizophyllum, Scytalidium, Sporotrichum, Talaromyces, Thermoascus, Thielavia, Trametes, Tolypocladium, Trichoderma, Verticillium, and/or Volvariella, and/or teleomorphs, or anamorphs, and synonyms, basionyms, or taxonomic equivalents thereof.

[0197] In some embodiments of the present invention, the host cell is a yeast cell, including but not limited to cells of Candida, Hansenula, Saccharomyces, Schizosaccharomyces, Pichia, Kluyveromyces, or Yarrowia species. In some embodiments of the present invention, the yeast cell is Hansenula polymorpha, Saccharomyces cerevisiae, Saccharomyces carlsbergensis, Saccharomyces diastaticus, Saccharomyces norbensis, Saccharomyces kluyveri, Schizosaccharomyces pombe, Pichia pastoris, Pichia finlandica, Pichia trehalophila, Pichia kodamae, Pichia membranaefaciens, Pichia opuntiae, Pichia thermotolerans, Pichia salictaria, Pichia quercuum, Pichia pijperi, Pichia stipitis, Pichia methanolica, Pichia angusta, Kluyveromyces lactis, Candida albicans, or Yarrowia lipolytica.

[0198] In some embodiments of the invention, the host cell is an algal cell such as Chlamydomonas (e.g., C. reinhardtii) and Phormidium (P. sp. ATCC29409).

[0199] In some other embodiments, the host cell is a prokaryotic cell. Suitable prokaryotic cells include, but are not limited to Gram-positive, Gram-negative and Gram-variable bacterial cells. Any suitable bacterial organism finds use in the present invention, including but not limited to Agrobacterium, Alicyclobacillus, Anabaena, Anacystis, Acinetobacter, Acidothermus, Arthrobacter, Azobacter, Bacillus, Bifidobacterium, Brevibacterium, Butyrivibrio, Buchnera, Campestris, Camplyobacter, Clostridium, Corynebacterium, Chromatium, Coprococcus, Escherichia, Enterococcus, Enterobacter, Erwinia, Fusobacterium, Faecalibacterium, Francisella, Flavobacterium, Geobacillus, Haemophilus, Helicobacter, Klebsiella, Lactobacillus, Lactococcus, Ilyobacter, Micrococcus, Microbacterium, Mesorhizobium, Methylobacterium, Methylobacterium, Mycobacterium, Neisseria, Pantoea, Pseudomonas, Prochlorococcus, Rhodobacter, Rhodopseudomonas, Rhodopseudomonas, Roseburia, Rhodospirillum, Rhodococcus, Scenedesmus, Streptomyces, Streptococcus, Synecoccus, Saccharomonospora, Staphylococcus, Serratia, Salmonella, Shigella, Thermoanaerobacterium, Tropheryma, Tularensis, Temecula, Thermosynechococcus, Thermococcus, Ureaplasma, Xanthomonas, Xylella, Yersinia and Zymomonas. In some embodiments, the host cell is a species ofAgrobacterium, Acinetobacter, Azobacter, Bacillus, Bifidobacterium, Buchnera, Geobacillus, Campylobacter, Clostridium, Corynebacterium, Escherichia, Enterococcus, Erwinia, Flavobacterium, Lactobacillus, Lactococcus, Pantoea, Pseudomonas, Staphylococcus, Salmonella, Streptococcus, Streptomyces, or Zymomonas. In some embodiments, the bacterial host strain is non-pathogenic to humans. In some embodiments the bacterial host strain is an industrial strain. Numerous bacterial industrial strains are known and suitable in the present invention. In some embodiments of the present invention, the bacterial host cell is an Agrobacterium species (e.g., A. radiobacter, A. rhizogenes, and A. rubi). In some embodiments of the present invention, the bacterial host cell is an Arthrobacter species (e.g., A. aurescens, A. citreus, A. globiformis, A. hydrocarboglutamicus, A. mysorens, A. nicotianae, A. paraffineus, A. protophonniae, A. roseoparqffinus, A. sulfureus, and A. ureafaciens). In some embodiments of the present invention, the bacterial host cell is a Bacillus species (e.g., B. thuringensis, B. anthracis, B. megaterium, B. subtilis, B. lentus, B. circulans, B. pumilus, B. lautus, B. coagulans, B. brevis, B. firmus, B. alkaophius, B. licheniformis, B. clausii, B. stearothermophilus, B. halodurans, and B. amyloliquefaciens). In some embodiments, the host cell is an industrial Bacillus strain including but not limited to B. subtilis, B. pumilus, B. licheniformis, B. megaterium, B. clausii, B. stearothermophilus, or B. amyloliquefaciens. In some embodiments, the Bacillus host cells are B. subtilis, B. licheniformis, B. megaterium, B. stearothermophilus, and/or B. amyloliquefaciens. In some embodiments, the bacterial host cell is a Clostridium species (e.g., C. acetobutylicum, C. tetani E88, C. lituseburense, C. saccharobutylicum, C. perfringens, and C. beijerinckii). In some embodiments, the bacterial host cell is a Corynebacterium species (e.g., C. glutamicum and C. acetoacidophilum). In some embodiments the bacterial host cell is an Escherichia species (e.g., E. coli). In some embodiments, the host cell is Escherichia coli W3110. In some embodiments, the bacterial host cell is an Erwinia species (e.g., E. uredovora, E. carotovora, E. ananas, E. herbicola, E. punctata, and E. terreus). In some embodiments, the bacterial host cell is a Pantoea species (e.g., P. citrea, and P. agglomerans). In some embodiments the bacterial host cell is a Pseudomonas species (e.g., P. putida, P. aeruginosa, P. mevalonii, and P. sp. D-01 10). In some embodiments, the bacterial host cell is a Streptococcus species (e.g., S. equisimiles, S. pyogenes, and S. uberis). In some embodiments, the bacterial host cell is a Streptomyces species (e.g., S. ambofaciens, S. achromogenes, S. avermitilis, S. coelicolor, S. aureofaciens, S. aureus, S. fungicidicus, S. griseus, and S. lividans). In some embodiments, the bacterial host cell is a Zymomonas species (e.g., Z. mobilis, and Z. lipolytica).

[0200] Many prokaryotic and eukaryotic strains that find use in the present invention are readily available to the public from a number of culture collections such as American Type Culture Collection (ATCC), Deutsche Sammlung von Mikroorganismen und Zellkulturen GmbH (DSM), Centraalbureau Voor Schimmelcultures (CBS), and Agricultural Research Service Patent Culture Collection, Northern Regional Research Center (NRRL).

[0201] In some embodiments, host cells are genetically modified to have characteristics that improve protein secretion, protein stability and/or other properties desirable for expression and/or secretion of a protein. Genetic modification can be achieved by genetic engineering techniques and/or classical microbiological techniques (e.g., chemical or UV mutagenesis and subsequent selection). Indeed, in some embodiments, combinations of recombinant modification and classical selection techniques are used to produce the host cells. Using recombinant technology, nucleic acid molecules can be introduced, deleted, inhibited or modified, in a manner that results in increased yields of galactose oxidase variant(s) within the host cell and/or in the culture medium. For example, knockout of Alp1 function results in a cell that is protease deficient, and knockout of pyr5 function results in a cell with a pyrimidine deficient phenotype. In one genetic engineering approach, homologous recombination is used to induce targeted gene modifications by specifically targeting a gene in vivo to suppress expression of the encoded protein. In alternative approaches, siRNA, antisense and/or ribozyme technology find use in inhibiting gene expression. A variety of methods are known in the art for reducing expression of protein in cells, including, but not limited to deletion of all or part of the gene encoding the protein and site-specific mutagenesis to disrupt expression or activity of the gene product. (See e.g., Chaveroche et al., Nucl. Acids Res., 28:22 e97 [2000]; Cho et al., Molec. Plant Microbe Interact., 19:7-15 [2006]; Maruyama and Kitamoto, Biotechnol Lett., 30:1811-1817 [2008]; Takahashi et al., Mol. Gen. Genom., 272: 344-352 [2004]; and You et al., Arch. Microbiol., 191:615-622 [2009], all of which are incorporated by reference herein). Random mutagenesis, followed by screening for desired mutations also finds use (See e.g., Combier et al., FEMS Microbiol. Lett., 220:141-8 [2003]; and Firon et al., Eukary. Cell 2:247-55 [2003], both of which are incorporated by reference).

[0202] Introduction of a vector or DNA construct into a host cell can be accomplished using any suitable method known in the art, including but not limited to calcium phosphate transfection, DEAE-dextran mediated transfection, PEG-mediated transformation, electroporation, or other common techniques known in the art. In some embodiments, the Escherichia coli expression vector pCK100900i (See, U.S. Pat. No. 9,714,437, which is hereby incorporated by reference) finds use.

[0203] In some embodiments, the engineered host cells (i.e., “recombinant host cells”) of the present invention are cultured in conventional nutrient media modified as appropriate for activating promoters, selecting transformants, or amplifying the galactose oxidase polynucleotide. Culture conditions, such as temperature, pH and the like, are those previously used with the host cell selected for expression, and are well-known to those skilled in the art. As noted, many standard references and texts are available for the culture and production of many cells, including cells of bacterial, plant, animal (especially mammalian) and archebacterial origin.

[0204] In some embodiments, cells expressing the variant galactose oxidase polypeptides of the invention are grown under batch or continuous fermentations conditions. Classical “batch fermentation” is a closed system, wherein the compositions of the medium is set at the beginning of the fermentation and is not subject to artificial alternations during the fermentation. A variation of the batch system is a “fed-batch fermentation” which also finds use in the present invention. In this variation, the substrate is added in increments as the fermentation progresses. Fed-batch systems are useful when catabolite repression is likely to inhibit the metabolism of the cells and where it is desirable to have limited amounts of substrate in the medium. Batch and fed-batch fermentations are common and well known in the art. “Continuous fermentation” is an open system where a defined fermentation medium is added continuously to a bioreactor and an equal amount of conditioned medium is removed simultaneously for processing. Continuous fermentation generally maintains the cultures at a constant high density where cells are primarily in log phase growth. Continuous fermentation systems strive to maintain steady state growth conditions. Methods for modulating nutrients and growth factors for continuous fermentation processes as well as techniques for maximizing the rate of product formation are well known in the art of industrial microbiology.

[0205] In some embodiments of the present invention, cell-free transcription/translation systems find use in producing variant galactose oxidase(s). Several systems are commercially available and the methods are well-known to those skilled in the art.

[0206] The present invention provides methods of making variant galactose oxidase polypeptides or biologically active fragments thereof. In some embodiments, the method comprises: providing a host cell transformed with a polynucleotide encoding an amino acid sequence that comprises at least about 70% (or at least about 75%, at least about 80%, at least about 85%, at least about 90%, at least about 95%, at least about 96%, at least about 97%, at least about 98%, or at least about 99%) sequence identity to SEQ ID NO: 4, 6, 38, 50, 114, 226, and/or 262, and comprising at least one mutation as provided herein; culturing the transformed host cell in a culture medium under conditions in which the host cell expresses the encoded variant galactose oxidase polypeptide; and optionally recovering or isolating the expressed variant galactose oxidase polypeptide, and/or recovering or isolating the culture medium containing the expressed variant galactose oxidase polypeptide. In some embodiments, the methods further provide optionally lysing the transformed host cells after expressing the encoded galactose oxidase polypeptide and optionally recovering and/or isolating the expressed variant galactose oxidase polypeptide from the cell lysate. The present invention further provides methods of making a variant galactose oxidase polypeptide comprising cultivating a host cell transformed with a variant galactose oxidase polypeptide under conditions suitable for the production of the variant galactose oxidase polypeptide and recovering the variant galactose oxidase polypeptide. Typically, recovery or isolation of the galactose oxidase polypeptide is from the host cell culture medium, the host cell or both, using protein recovery techniques that are well known in the art, including those described herein. In some embodiments, host cells are harvested by centrifugation, disrupted by physical or chemical means, and the resulting crude extract retained for further purification. Microbial cells employed in expression of proteins can be disrupted by any convenient method, including, but not limited to freeze-thaw cycling, sonication, mechanical disruption, and/or use of cell lysing agents, as well as many other suitable methods well known to those skilled in the art.

[0207] Engineered galactose oxidase enzymes expressed in a host cell can be recovered from the cells and/or the culture medium using any one or more of the techniques known in the art for protein purification, including, among others, lysozyme treatment, sonication, filtration, salting-out, ultra-centrifugation, and chromatography. Suitable solutions for lysing and the high efficiency extraction of proteins from bacteria, such as E. coli, are commercially available under the trade name CelLytic B™ (Sigma-Aldrich). Thus, in some embodiments, the resulting polypeptide is recovered/isolated and optionally purified by any of a number of methods known in the art. For example, in some embodiments, the polypeptide is isolated from the nutrient medium by conventional procedures including, but not limited to, centrifugation, filtration, extraction, spray-drying, evaporation, chromatography (e.g., ion exchange, affinity, hydrophobic interaction, chromatofocusing, and size exclusion), or precipitation. In some embodiments, protein refolding steps are used, as desired, in completing the configuration of the mature protein. In addition, in some embodiments, high performance liquid chromatography (HPLC) is employed in the final purification steps. For example, in some embodiments, methods known in the art, find use in the present invention (See e.g., Parry et al., Biochem. J., 353:117 [2001]; and Hong et al., Appl. Microbiol. Biotechnol., 73:1331 [2007], both of which are incorporated herein by reference). Indeed, any suitable purification methods known in the art find use in the present invention.

[0208] Chromatographic techniques for isolation of the galactose oxidase polypeptide include, but are not limited to reverse phase chromatography high performance liquid chromatography, ion exchange chromatography, gel electrophoresis, and affinity chromatography. Conditions for purifying a particular enzyme will depend, in part, on factors such as net charge, hydrophobicity, hydrophilicity, molecular weight, molecular shape, etc., are known to those skilled in the art.

[0209] In some embodiments, affinity techniques find use in isolating the improved galactose oxidase enzymes. For affinity chromatography purification, any antibody which specifically binds the galactose oxidase polypeptide may be used. For the production of antibodies, various host animals, including but not limited to rabbits, mice, rats, etc., may be immunized by injection with the galactose oxidase. The galactose oxidase polypeptide may be attached to a suitable carrier, such as BSA, by means of a side chain functional group or linkers attached to a side chain functional group. Various adjuvants may be used to increase the immunological response, depending on the host species, including but not limited to Freund's (complete and incomplete), mineral gels such as aluminum hydroxide, surface active substances such as lysolecithin, pluronic polyols, polyanions, peptides, oil emulsions, keyhole limpet hemocyanin, dinitrophenol, and potentially useful human adjuvants such as BCG (Bacillus Calmette Guerin) and Corynebacterium parvum.

[0210] In some embodiments, the galactose oxidase variants are prepared and used in the form of cells expressing the enzymes, as crude extracts, or as isolated or purified preparations. In some embodiments, the galactose oxidase variants are prepared as lyophilisates, in powder form (e.g., acetone powders), or prepared as enzyme solutions. In some embodiments, the galactose oxidase variants are in the form of substantially pure preparations.

[0211] In some embodiments, the galactose oxidase polypeptides are attached to any suitable solid substrate. Solid substrates include but are not limited to a solid phase, surface, and/or membrane. Solid supports include, but are not limited to organic polymers such as polystyrene, polyethylene, polypropylene, polyfluoroethylene, polyethyleneoxy, and polyacrylamide, as well as co-polymers and grafts thereof. A solid support can also be inorganic, such as glass, silica, controlled pore glass (CPG), reverse phase silica or metal, such as gold or platinum. The configuration of the substrate can be in the form of beads, spheres, particles, granules, a gel, a membrane or a surface. Surfaces can be planar, substantially planar, or non-planar. Solid supports can be porous or non-porous, and can have swelling or non-swelling characteristics. A solid support can be configured in the form of a well, depression, or other container, vessel, feature, or location. A plurality of supports can be configured on an array at various locations, addressable for robotic delivery of reagents, or by detection methods and/or instruments.

[0212] In some embodiments, immunological methods are used to purify galactose oxidase variants. In one approach, antibody raised against a variant galactose oxidase polypeptide (e.g., against a polypeptide comprising any of SEQ ID NO: 4, 6, 38, 50, 114, 226, and/or 262, and/or an immunogenic fragment thereof) using conventional methods is immobilized on beads, mixed with cell culture media under conditions in which the variant galactose oxidase is bound, and precipitated. In a related approach, immunochromatography finds use.

[0213] In some embodiments, the variant galactose oxidases are expressed as a fusion protein including a non-enzyme portion. In some embodiments, the variant galactose oxidase sequence is fused to a purification facilitating domain. As used herein, the term “purification facilitating domain” refers to a domain that mediates purification of the polypeptide to which it is fused. Suitable purification domains include, but are not limited to metal chelating peptides, histidine-tryptophan modules that allow purification on immobilized metals, a sequence which binds glutathione (e.g., GST), a hemagglutinin (HA) tag (corresponding to an epitope derived from the influenza hemagglutinin protein; See e.g., Wilson et al., Cell 37:767 [1984]), maltose binding protein sequences, the FLAG epitope utilized in the FLAGS extension/affinity purification system (e.g., the system available from Immunex Corp), and the like. One expression vector contemplated for use in the compositions and methods described herein provides for expression of a fusion protein comprising a polypeptide of the invention fused to a polyhistidine region separated by an enterokinase cleavage site. The histidine residues facilitate purification on IMIAC (immobilized metal ion affinity chromatography; See e.g., Porath et al., Prot. Exp. Purif., 3:263-281 [1992]) while the enterokinase cleavage site provides a means for separating the variant galactose oxidase polypeptide from the fusion protein. pGEX vectors (Promega) may also be used to express foreign polypeptides as fusion proteins with glutathione S-transferase (GST). In general, such fusion proteins are soluble and can easily be purified from lysed cells by adsorption to ligand-agarose beads (e.g., glutathione-agarose in the case of GST-fusions) followed by elution in the presence of free ligand.

[0214] Accordingly, in another aspect, the present invention provides methods of producing the engineered enzyme polypeptides, where the methods comprise culturing a host cell capable of expressing a polynucleotide encoding the engineered enzyme polypeptide under conditions suitable for expression of the polypeptide. In some embodiments, the methods further comprise the steps of isolating and/or purifying the enzyme polypeptides, as described herein.

[0215] Appropriate culture media and growth conditions for host cells are well known in the art. It is contemplated that any suitable method for introducing polynucleotides for expression of the enzyme polypeptides into cells will find use in the present invention. Suitable techniques include, but are not limited to electroporation, biolistic particle bombardment, liposome mediated transfection, calcium chloride transfection, and protoplast fusion.

[0216] Various features and embodiments of the present invention are illustrated in the following representative examples, which are intended to be illustrative, and not limiting.

### EXPERIMENTAL

[0217] The following Examples, including experiments and results achieved, are provided for illustrative purposes only and are not to be construed as limiting the present invention. Indeed, there are various suitable sources for many of the reagents and equipment described below. It is not intended that the present invention be limited to any particular source for any reagent or equipment item.

[0218] In the experimental disclosure below, the following abbreviations apply: M (molar); mM (millimolar), uM and μM (micromolar); nM (nanomolar); mol (moles); gm and g (gram); mg (milligrams); ug and μg (micrograms); L and 1 (liter); ml and mL (milliliter); cm (centimeters); mm (millimeters); um and μm (micrometers); sec. (seconds); min(s) (minute(s)); h(s) and hr(s) (hour(s)); U (units); MW (molecular weight); rpm (rotations per minute); psi and PSI (pounds per square inch); ° C. (degrees Centigrade); RT and rt (room temperature); RH (relative humidity); CV (coefficient of variability); CAM and cam (chloramphenicol); PMBS (polymyxin B sulfate); IPTG (isopropyl β-D-1-thiogalactopyranoside); LB (Luria broth); TB (terrific broth); SFP (shake flask powder); CDS (coding sequence); DNA (deoxyribonucleic acid); RNA (ribonucleic acid); nt (nucleotide; polynucleotide); aa (amino acid; polypeptide); E. coli W3110 (commonly used laboratory E. coli strain, available from the Coli Genetic Stock Center [CGSC], New Haven, CT); HTP (high throughput); HPLC (high pressure liquid chromatography); HPLC-UV (HPLC-Ultraviolet Visible Detector); 1H NMR (proton nuclear magnetic resonance spectroscopy); FIOPC (fold improvements over positive control); Sigma and Sigma-Aldrich (Sigma-Aldrich, St. Louis, MO; Difco (Difco Laboratories, BD Diagnostic Systems, Detroit, MI); Microfluidics (Microfluidics, Westwood, MA); Life Technologies (Life Technologies, a part of Fisher Scientific, Waltham, MA); Amresco (Amresco, LLC, Solon, OH); Carbosynth (Carbosynth, Ltd., Berkshire, UK); Varian (Varian Medical Systems, Palo Alto, CA); Agilent (Agilent Technologies, Inc., Santa Clara, CA); Infors (Infors USA Inc., Annapolis Junction, MD); and Thermotron (Thermotron, Inc., Holland, MI).

### Example 1

[0219] Production of Engineered Polypeptides in pCK110900

[0220] The polynucleotide (SEQ ID NO: 3) encoding the polypeptide, with an added six Histidine tag in the C-terminus, from Fusarium gramenearum having galactose oxidase activity (SEQ ID NO: 4) was cloned into a pCK110900 vector system (See e.g., U.S. Pat. No. 9,714,437, which is hereby incorporated by reference in its entirety). The polynucleotide was subsequently expressed in E. coli W3110fhuA under the control of the lac promoter.

[0221] In a 96-well format, single colonies were picked and grown in 190 μL LB containing 1% glucose and 30 μg/mL chloramphenicol (CAM), at 30° C., 200 rpm, and 85% relative humidity. Following overnight growth, 20 μL of the grown cultures were transferred into a deep-well plate containing 380 μL of TB with 30 μg/mL CAM. The cultures were grown at 30° C., 250 rpm, with 85% relative humidity for approximately 2.25 hours. When the optical density (OD₆₀₀) of the cultures reached 0.4-0.6, expression of the galactose oxidase gene was induced by addition of IPTG to a final concentration of 1 mM. Following induction, growth was continued for 18-20 hours at 30° C., 250 rpm with 85% relative humidity. Cells were harvested by centrifugation at 4000 rpm at 4° C. for 10-20 minutes and the media discarded. The cell pellets were stored at −80° C. until ready for use. Prior to performing the assay, cell pellets were resuspended in 200 μL of lysis buffer containing 25 mM Bis-Tris, pH 7.5, with 1 g/L lysozyme, and 0.5 g/L PMBS. In some embodiments, the cell pellets were resuspended in 200 μL of lysis buffer containing 25 mM Bis-Tris, pH 7.5, 0.5 mM CuSO₄, with 1 g/L lysozyme, and 0.5 g/L PMBS. The plates were agitated with medium-speed shaking, for 2 hours on a microtiter plate shaker, at room temperature. The plates were then centrifuged at 4000 rpm for 15-20 minutes at 4° C., and the clarified supernatants were used in the HTP assay reaction described below.

[0222] Shake-flask procedures can be used to generate engineered galactose oxidase polypeptide shake flask powders, which are useful for secondary screening assays and/or use in the biocatalytic processes described herein. Shake flask powder (SFP) preparation of enzymes provides a more purified preparation (e.g., up to 30% of total protein) of the engineered enzyme, as compared to the cell lysate used in HTP assays and also allows for the use of more concentrated enzyme solutions. To start the cultures, a single colony of E. coli, transformed with a plasmid encoding an engineered polypeptide of interest, was inoculated into 6 mL LB with 30 μg/mL CAM and 1% glucose. The culture was grown overnight (at least 16 hours) in an incubator at 30° C., with shaking at 250 rpm. Following the overnight growth, 5 mL of the culture was inoculated into 250 mL of TB with 30 μg/mL CAM, in a 1L shake flask. The 250 mL culture was grown at 30° C. at 250 rpm, for 2-3 hours until OD₆₀₀ reached 0.6-0.8. Expression of the galactose oxidase gene was induced by addition of IPTG to a final concentration of 1 mM. Growth was continued for an additional 18-20 hours at 30° C. and 250 rpm. Cells were harvested by transferring the culture into a pre-weighed centrifuge bottle, then centrifuged at 7,000 rpm for 10 minutes at 4° C. The supernatant was discarded. The remaining cell pellet was weighed. In some embodiments, the cells are stored at −80° C. until ready to use. For lysis, the cell pellet was resuspended in 30 mL of cold 25 mM Bis-Tris, pH 7.5. The resuspended cells were lysed using a 110L MICROFLUIDIZER® processor system (Microfluidics). Cell debris was removed by centrifugation at 10,000 rpm for 60 minutes at 4° C. The clarified lysate was collected, frozen at −80° C., and then lyophilized, using standard methods known in the art. Lyophilization of frozen clarified lysate provides a dry shake-flask powder comprising crude engineered polypeptide.

### Example 2

[0223] Evolution and Screening of Engineered Polypeptides Derived from SEQ ID NO: 4 for Improved Galactose Oxidase Activity for Production of Ethynyl Glyceraldehyde Phosphate

[0224] The engineered polynucleotide (SEQ ID NO: 3) encoding the polypeptide with galactose oxidase activity of SEQ ID NO: 4 was used to generate the engineered polypeptides of Table 2-1. These polypeptides displayed improved galactose oxidase activity under the desired conditions (e.g., the production of ethynyl glyceraldehyde phosphate) as compared to the starting polypeptide. The engineered polypeptides, having the amino acid sequences of even-numbered sequence identifiers were generated from the “backbone” amino acid sequence of SEQ ID NO: 4 as described, and identified using the HTP assay, described below, and analytical methods shown in Table 2-2.

[0225] Directed evolution began with the polynucleotide set forth in SEQ ID NO: 3. Libraries of engineered polypeptides were generated using various well-known techniques (e.g., saturation mutagenesis, recombination of previously identified beneficial amino acid differences) and screened using the HTP assay below and the analytical method described in Table 2-2.

[0226] The enzyme assay was carried out in a 96-well deep-well (2 mL) plates, in 100 μL total volume/well. The reactions were carried out using 5% (v/v) HTP lysate, 1 g/L horseradish peroxidase (HRP), 0.2 g/L catalase, 10 g/L ethynyl glycerol phosphate, 0.2 mM CuSO₄, 50 mM PIPES, pH 7.0. The reactions were set up by adding the following: 1.) 80 μL of a master mix solution containing 12.5 g/L ethynyl glycerol phosphate, 1.25 g/L HRP, 0.25 g/L catalase, 62.5 mM PIPES, PH 7.0, 0.25 mM CuSO₄; the pH of the solution was adjusted to 6.5, and 2.) 20 μL of 25% HTP lysate. The reaction plate was heat-sealed and centrifuged briefly. The plates are then shaken at 600 rpm at 30° C. for 3 hours.

[0227] After the 3-hour incubation, 200 μL of 50 mM potassium phosphate, pH 7.5 were added into each well, and the plates were re-sealed and shaken for 10 minutes at room temperature. In new plates, diluted reactions, 50 μL, were mixed in 150 μL of 10 g/L O-benzylhydroxyl amine dissolved in methanol. The plates were sealed and shaken at room temperature for 20-30 minutes. The samples were diluted 2-fold in water prior to UPLC analysis.

[0228] Hit variants were grown in 250-mL shake flask, and shake flask powders were generated. The activity of the SFPs were evaluated at 0.06-8 g/L SF Powder, 1 g/L horseradish peroxidase (HRP), 0.2 g/L catalase, 10 g/L ethynyl glycerol phosphate, 0.2 mM CuSO₄, and 50 mM PIPES, pH 7.0. The reactions were set up using a similar procedure as described above.

TABLE 2-1
Improved Variants Relative to SEQ ID NO: 4

| SEQ ID NO: | Amino Acid Differences | FIOP Product Relative to |
|---|---|---|
| (nt/aa) | (Relative to SEQ ID NO: 4) | SEQ ID NO: 4 |
| 5/6 | E196R | +++ |
| 7/8 | E196R/D408N/G462A | ++ |
| 9/10 | E196R/F442Y | ++ |
| 11/12 | F442Y | + |
| 13/14 | L329W | + |
| 15/16 | E196R/R327L | + |
| 17/18 | S292R | + |
| 19/20 | R218T | + |
| 21/22 | E196Q | + |
| 23/24 | D408N | + |
| 25/26 | R218V | + |
| 27/28 | E196R/F442Y/G462A/T583S | + |
| 29/30 | N47T | + |
| 31/32 | C19F/I547N/W564G | + |
| 33/34 | Q407G | + |
| 35/36 | T111E | + |

Levels of increased activity were determined relative to the reference polypeptide of SEQ ID NO: 4 and defined as follows: “+” 1.15 to 1.50, “++” >1.50, “+++” >1.70

TABLE 2-2
UPLC Parameters for Examples 2-8

| Instrument | Thermo Ultimate 3000 UPLC | |
|---|---|---|
| Column | Waters Acquity HSS T3, 2.1 × 50 mm, 1.8 um | |
| | Gradient (A: 0.1% Formic acid in water B: | |
| | 0.1% Formic acid in acetonitrile | |
| Mobile Phase | Time(min) | % B |
| | 0.00 | 8 |
| | 0.1 | 8 |
| | 1 | 70 |
| | 1.1 | 100 |
| | 1.3 | 100 |
| | 1.5 | 8 |
| | 2.1 | 8 |

| | |
|---|---|
| Flow Rate | 1.0 mL/min |
| Run time | 2.1 min |
| Detector | 254 nm |
| Peak | O-benzylhydroxyl amine derivatized ethynyl |
| Retention | glyceraldehyde phosphate at 1.31 minutes |
| Times | |
| Column | 40° C. |
| Temperature | |
| Sample | 25° C. |
| Temperature | |
| Injection | 10 μL |
| Volume | |

### Example 3

[0229] Evolution and Screening of Engineered Polypeptides Derived from SEQ ID NO: 6 for Improved Galactose Oxidasae Activity for Production of Ethynyl Glyceraldehyde Phosphate

[0230] The engineered polynucleotide (SEQ ID NO: 5) encoding the polypeptide with galactose oxidase of SEQ ID NO: 6 was used to generate the engineered polypeptides in Table 3-1. These polypeptides displayed improved galactose oxidase activity under the desired conditions (e.g., the production of ethynyl glyceraldehyde phosphate) as compared to the starting polypeptide. The engineered polypeptides, having the amino acid sequences of even-numbered sequence identifiers were generated from the “backbone” amino acid sequence of SEQ ID NO: 6 as described, and identified using the HTP assay described below and analytical methods described in Table 2-2.

[0231] Directed evolution began with the polynucleotide set forth in SEQ ID NO: 5. Libraries of engineered polypeptides were generated using various well-known techniques (e.g., saturation mutagenesis, recombination of previously identified beneficial amino acid differences) and screened using the HTP assay below and the analytical method described in Table 2-2.

[0232] The enzyme assay was carried out in a 96-well deep-well (2 mL) plates, in 100 μL total volume/well. The reactions were carried out using 1.25% (v/v) HTP lysate, 1 g/L horseradish peroxidase (HRP), 0.2 g/L catalase, 10 g/L ethynyl glycerol phosphate (51.3 mM), 0.2 mM CuSO₄, 50 mM Bis-Tris, pH 6.5. The reactions were set up by adding the following: 1.) 75 μL of a master mix solution containing 13.3 g/L ethynyl glycerol phosphate, 1.3 g/L HRP, 0.27 g/L catalase, 66.7 mM Bis-Tris, pH 6.5, 0.27 mM CuSO₄; the pH of the solution was adjusted to 6.5, and 2.) 25 μL of 5% HTP lysate. The reaction plate was heat-sealed and centrifuged briefly. The plates were then shaken at 600 rpm at 30° C. for 3 hours.

[0233] After the 3-hour incubation, 200 μL of 50 mM potassium phosphate, pH 7.5 were added into each well, and the plates were re-sealed and shaken for 10 minutes at room temperature. In new plates, diluted reactions, 50 μL, were mixed in 150 μL of 10 g/L O-benzylhydroxyl amine dissolved in methanol. The plates were sealed and shaken at room temperature for 20-30 minutes. The samples were diluted 2-fold in water prior to UPLC analysis.

[0234] Hit variants were grown in 250-mL shake flask and shake flask powders generated. The activity of the SFPs were evaluated at 0.06-8 g/L SF Powder, 1 g/L horseradish peroxidase (HRP), 0.2 g/L catalase, 10 g/L ethynyl glycerol phosphate, 0.2 mM CuSO₄, and 50 mM Bis-Tris, pH 6.5. The reactions were set up using a similar procedure as described above.

TABLE 3-1
Improved Variants Relative to SEQ ID NO: 6

| SEQ ID NO: | Amino Acid Differences | FIOP Product Relative to |
|---|---|---|
| (nt/aa) | (Relative to SEQ ID NO: 6) | SEQ ID NO: 6 |
| 37/38 | Q407E | ++ |
| 39/40 | Y291F | + |
| 41/42 | L437N | + |
| 43/44 | L437N/K486V | + |
| 45/46 | Q407S | + |

Levels of increased activity were determined relative to the reference polypeptide of SEQ ID NO: 6 and defined as follows: “+” 1.15 to 1.50, “++” >1.50

### Example 4

[0235] Evolution and Screening of Engineered Polypeptides Derived from SEQ ID NO: 38 for Improved Galactose Oxidase Activity for the Formation of Ethynyl Glyceraldehyde Phosphate

[0236] The engineered polynucleotide (SEQ ID NO: 37) encoding the polypeptide with galactose oxidase activity of SEQ ID NO: 38 was used to generate the engineered polypeptides of Table 4-1. These polypeptides displayed improved galactose oxidase activity under the desired conditions (e.g., formation of ethynyl glyceraldehyde phosphate) as compared to the starting polypeptide. The engineered polypeptides, having the amino acid sequences of even-numbered sequence identifiers were generated from the “backbone” amino acid sequence of SEQ ID NO: 38 as described, and identified using the HTP assay described below and analytical methods described in Table 2-2.

[0237] Directed evolution began with the polynucleotide set forth in SEQ ID NO: 37. Libraries of engineered polypeptides were generated using various well-known techniques (e.g., saturation mutagenesis, recombination of previously identified beneficial amino acid differences) and screened using HTP assay below and the analytical method described in Table 2-2.

[0238] The enzyme assay was carried out in a 96-well deep-well (2 mL) plates, in 100 μL total volume/well. The reactions were carried out using 1% (v/v) HTP lysate, 250 mM ethynyl glycerol phosphate, 1 g/L horseradish peroxidase (HRP), 0.2 g/L catalase, 0.2 mM CuSO₄, 50 mM Bis-Tris, pH 7.5. The reactions were set up by adding the following: 1.) 75 μL of a master mix solution containing 333.3 mM ethynyl glycerol phosphate, 1.3 g/L HRP, 0.27 g/L catalase, 66.7 mM Bis-Tris, pH 7.5, 0.27 mM CuSO₄; the pH of the solution was adjusted to 7.5, and 2.) 25 μL of 4% HTP lysate. The reaction plate was heat-sealed and centrifuged briefly. The plates were then shaken at 600 rpm at 30° C. for 18-20 hours.

[0239] After the 18-20-hour incubation, 200 μL of 50 mM potassium phosphate, pH 7.5 were added into each well, and the plates were re-sealed and shaken for 10 minutes at room temperature. In new plates, diluted reactions, 50 μL, were mixed in 150 μL of 10 g/L O-benzylhydroxyl amine dissolved in methanol. The plates were sealed and shaken at room temperature for 20-30 minutes. The samples were diluted 2-fold in water prior to UPLC analysis.

[0240] Hit variants were grown in 250-mL shake flask and shake flask powders generated. The activity of the SFPs were evaluated at 0.16-5 g/L SF Powder, 1 g/L horseradish peroxidase (HRP), 0.2 g/L catalase, 250 mM ethynyl glycerol phosphate, 0.2 mM CuSO₄, and 50 mM Bis-Tris, pH 7.5. The reactions were set up using a similar procedure as described above.

TABLE 4-1
Improved Variants Relative to SEQ ID NO: 38

| SEQ | | FIOP Product |
|---|---|---|
| ID NO: | Amino Acid Differences | Relative to |
| (nt/aa) | (Relative to SEQ ID NO: 38) | SEQ ID NO: 38 |
| 47/48 | Y291F/L437N/G462A | +++ |
| 49/50 | Y291F/G462A | ++ |
| 51/52 | L437N/G462A | ++ |
| 53/54 | Y291F | ++ |
| 55/56 | Y291F/D408N/L437N | ++ |
| 57/58 | E297L/G462A | ++ |
| 59/60 | G462A | ++ |
| 61/62 | Y291F/D408N/G462A | + |
| 63/64 | L437N/G462A | + |
| 65/66 | I56Y/N274Q/Y291F | + |
| 67/68 | I29N/I56Y/Q192N/D197R/T219V/ | + |
| | G224K/Y291F/Q295V/V296F | |
| 69/70 | V63T/Y291F/Q295V | + |
| 71/72 | I56Y/N274Q/Q295V | + |
| 73/74 | L437N/G462A | + |
| 75/76 | V8S/V63T/G224K/N274Q/Y291F/ | + |
| | Q295V/V296F | |
| 77/78 | V63T/Q192N/Q295V | + |
| 79/80 | S220V/S426L/M567S | + |
| 81/82 | T111S/G462A | + |
| 83/84 | D408N/G462A | + |
| 85/86 | Q43F/Q192N/N274Q/Y291F/V296F | + |
| 87/88 | V8S/N274Q/Y291F/Q295V | + |
| 89/90 | D197G/S220V/S426L | + |
| 91/92 | S173A/Y291F | + |
| 93/94 | V63T/S173A/Q192N/N274Q | + |
| 95/96 | S243T/N274Q/Y291F/Q295V/N637R | + |
| 97/98 | Y291F/L437N | + |
| 99/100 | S220V/Q295R | + |
| 101/102 | V8S/I29N/Q192N/R196E/N274Q/Q295V | + |
| 103/104 | V8S/S173A/Q192N/G224K/Y291F/ | + |
| | Q295V/V296F | |
| 105/106 | F438A | + |
| 107/108 | S220V/D375N/S426L | + |
| 109/110 | Y291F/T429I | + |

Levels of increased activity were determined relative to the reference polypeptide of SEQ ID NO: 38 and defined as follows: “+” 1.15 to 1.40, “++” >1.40, “+++” >1.50

### Example 5

[0241] Evolution and Screening of Engineered Polypeptides Derived from SEQ ID NO: 50 for Improved Galactose Oxidase Activity for the Formation of Ethynyl Glyceraldehyde Phosphate

[0242] The engineered polynucleotide (SEQ ID NO: 49) encoding the polypeptide with galactose oxidase activity of SEQ ID NO: 50 was used to generate the engineered polypeptides of Table 5-1. These polypeptides displayed improved galactose oxidase activity under the desired conditions (e.g., the formation of ethynyl glyceraldehyde phosphate) as compared to the starting polypeptide. The engineered polypeptides, having the amino acid sequences of even-numbered sequence identifiers were generated from the “backbone” amino acid sequence of SEQ ID NO: 50 as described, and identified using the HTP assay described below and analytical methods described in Table 2-2.

[0243] Directed evolution began with the polynucleotide set forth in SEQ ID NO: 49. Libraries of engineered polypeptides were generated using various well-known techniques (e.g., saturation mutagenesis, recombination of previously identified beneficial amino acid differences) and screened using HTP assay and analysis methods as indicated.

[0244] The enzyme assay was carried out in a 96-well deep-well (2 mL) plates, in 100 μL total volume/well. The cell pellets were lysed with 50 mM Bis-Tris, pH 7.5 with 1 g/L lysozyme, 0.5 g/L PMBS, and 0.5 mM CUSO₄. The clarified lysates were diluted in 25 mM Bis-Tris, pH 7.5. The reactions were carried out using 1% (v/v) HTP lysate, 250 mM ethynyl glycerol phosphate, 1 g/L horseradish peroxidase (HRP), 0.2 g/L catalase, 5 μM CuSO₄ residual from the lysis buffer, and 50 mM Bis-Tris, pH 7.5. The reactions were set up by adding the following: 1.) 75 μL of a master mix solution containing 333.3 mM ethynyl glycerol phosphate, 1.3 g/L HRP, 0.27 g/L catalase, 66.7 mM Bis-Tris, pH 7.5, and 2.) 25 μL of 4% diluted HTP lysate. The reaction plate was heat-sealed and centrifuged briefly. The plates were then shaken at 600 rpm at 30° C. for 18-20 hours.

[0245] After the 18-20-hour incubation, 200 μL of 50 mM potassium phosphate, pH 7.5 were added into each well, and the plates were re-sealed and shaken for 10 minutes at room temperature. In new plates, diluted reactions, 50 μL, were mixed in 150 μL of 10 g/L O-benzylhydroxyl amine dissolved in methanol. The plates were sealed and shaken at room temperature for 20-30 minutes. The samples were diluted 2-fold in water prior to UPLC analysis.

[0246] Hit variants were grown in 250-mL shake flask and shake flask powders generated. The SF powders were resuspended in 50 mM Bis-Tris, pH 7.5 and 0.5 mM CuSO₄, with mild shaking, for 1.5 hours at room temperature. The resuspended SF Powders were diluted in 25 mM Bis-Tris, pH 7.5 prior to activity determination. The activity of the SF Powder was evaluated at 0.16-12.5 g/L SF Powder, 1 g/L horseradish peroxidase (HRP), 0.2 g/L catalase, 250 mM ethynyl glycerol phosphate, and 50 mM Bis-Tris, pH 7.5. The reactions were set up using a similar procedure as described above.

TABLE 5-1
Improved Variants Relative to SEQ ID: 50

| SEQ | | FIOP Product |
|---|---|---|
| ID NO: | Amino Acid Differences | Relative to |
| (nt/aa) | (Relative to SEQ ID NO: 50) | SEQ ID NO: 50 |
| 111/112 | G158E/Q192N/D408N/V556K | +++ |
| 113/114 | G158E/Q192N/N274Q/L437N/V556K | ++ |
| 115/116 | V46T/Q192N | ++ |
| 117/118 | G158E/Q192N/D217E/V556K | ++ |
| 119/120 | V46T/Q192N/D375N/L437N | ++ |
| 121/122 | V46A/G158E/Q192N/K367L/D375N/V556K | ++ |
| 123/124 | Q192N/Q295V | ++ |
| 125/126 | Q192N/L437N/V556K | ++ |
| 127/128 | G158E/Q192N/N274Q/S304E | ++ |
| 129/130 | Q192N/S304E/D365G/L437N | ++ |
| 131/132 | D217E/S304E/L437N | ++ |
| 133/134 | G158E/Q192N/K367L/V556K | ++ |
| 135/136 | Q192N/D217E/V556K | ++ |
| 137/138 | Q192N | ++ |
| 139/140 | Q192N/S304E/K367L | ++ |
| 141/142 | G158E/Q192N/S304E/D408N/V556K/ | + |
| | N637R | |
| 143/144 | Q192N/K367L/D408N/S426L/L437Y/ | + |
| | V556K | |
| 145/146 | Q192N/N274Q/D375N | + |
| 147/148 | Q192N/D217E/K367L/D375N/V556K | + |
| 149/150 | V46A/Q192N/K367L/V556K | + |
| 151/152 | V46A/Q192N/D217E/N274Q/V556K | + |
| 153/154 | Q192N/K367L | + |
| 155/156 | Q192N/N274Q/K367L/N637R | + |
| 157/158 | Q192N/N637R | + |
| 159/160 | V46T/Q192N/K367L/D408N | + |
| 161/162 | Q192N/S304E | + |
| 163/164 | Q192N/E297L/L437N | + |
| 165/166 | K367L/V556K | + |
| 167/168 | V46T/Q192N/N274Q/L437N/V556K | + |
| 169/170 | Q192N/K367L/D375N/V556K | + |
| 171/172 | G158E/Q192N/K367L/D375N | + |
| 173/174 | S304E/S426L/V556K | + |
| 175/176 | V46A/G158E/Q192N/D217E/E297L/V556K | + |
| 177/178 | Q192N/Q295V/K367L/D375N | + |
| 179/180 | K367L | + |
| 181/182 | V46A/N274Q/K367L/D375N/L437N/N637R | + |
| 183/184 | G158E/Q192N/N274Q/V556K | + |
| 185/186 | Q192N/S304E/N637R | + |
| 187/188 | V46T/Q192N/N274Q/S304E/K367L/N637R | + |
| 189/190 | Q192N/D217E/Q295V/E297L/K367L/ | + |
| | V556K | |
| 191/192 | V46A/Q192N/S304E/K367L | + |
| 193/194 | Q192N/E297L/K367L/G644S | + |
| 195/196 | D375N | + |
| 197/198 | G158E/N637R | + |
| 199/200 | T311A/K343E/T550L | + |
| 201/202 | S24E/P52L/T311A/T550V | + |
| 203/204 | V46A/Q192N | + |
| 205/206 | S426L | + |
| 207/208 | N274Q/S304E/K367L/S426L/V556K | + |
| 209/210 | Q192N/Q295V/S304E | + |
| 211/212 | Q192N/N274Q/K367L/V556K | + |
| 213/214 | T550L | + |
| 215/216 | V46A/E297L/S304E/K367L/L437N/N637R | + |
| 217/218 | Q192N/N274Q/S304E/S426L | + |
| 219/220 | L437Y | + |
| 221/222 | V46T/Q192N/N274Q/L437Y/V556K | + |
| 223/224 | Q192N/N274Q | + |

Levels of increased activity were determined relative to the reference polypeptide of SEQ ID NO: 50 and defined as follows: “+” 1.15 to 1.40, “++” >1.40, “+++” >1.75

### Example 6

[0247] Evolution and Screening of Engineered Polypeptides Derived from SEQ ID NO:114 for Improved Galactose Oxidase Activity for the Formation of Ethynyl Glyceraldehyde Phosphate

[0248] The engineered polynucleotide (SEQ ID NO: 113) encoding the polypeptide with galactose oxidase activity of SEQ ID NO: 114 was used to generate the engineered polypeptides of Table 5-1. These polypeptides displayed improved galactose oxidase activity under the desired conditions (e.g., the formation of ethynyl glyceraldehyde phosphate) as compared to the starting polypeptide. The engineered polypeptides, having the amino acid sequences of even-numbered sequence identifiers were generated from the “backbone” amino acid sequence of SEQ ID NO: 114 as described, and identified using the HTP assay described below and analytical methods described in Table 2-2.

[0249] Directed evolution began with the polynucleotide set forth in SEQ ID NO: 113. Libraries of engineered polypeptides were generated using various well-known techniques (e.g., saturation mutagenesis, recombination of previously identified beneficial amino acid differences) and screened using HTP assay and analysis methods as indicated.

[0250] The enzyme assay was carried out in a 96-well deep-well (2 mL) plates, in 100 μL total volume/well. The cell pellets were lysed with 50 mM Bis-Tris, pH 7.5 with 1 g/L lysozyme, 0.5 g/L PMBS, 0.5 mM CuSO₄. The clarified lysates were diluted in 25 mM Bis-Tris, pH 7.5 prior to the assay. The reactions were carried out using 0.5% (v/v) HTP lysate, 250 mM ethynyl glycerol phosphate, 1 g/L horseradish peroxidase (HRP), 0.2 g/L catalase, 4 μM CuSO₄ residual from the lysis buffer, 50 mM Bis-Tris, pH 7.5. The reactions were set up by adding the following: 1.) 80 μL of a master mix solution containing 312.5 mM ethynyl glycerol phosphate, 1.25 g/L HRP, 0.25 g/L catalase, 62.5 mM Bis-Tris, pH 7.5, and 2.) 20 μL of 2.5% diluted HTP lysate. The reaction plate was heat-sealed and centrifuged briefly. The plates were then shaken at 600 rpm at 30° C. for 18-20 hours.

[0251] After the 18-20-hour incubation, 200 μL of 50 mM potassium phosphate, pH 7.5 was added into each well, and the plates were re-sealed and shaken for 10 minutes at room temperature. In new plates, diluted reactions, 50 μL, were mixed in 150 μL of 10 g/L O-benzylhydroxyl amine dissolved in methanol. The plates were sealed and shaken at room temperature for 20-30 minutes. The samples were diluted 2-fold in water prior to UPLC analysis.

[0252] Hit variants were grown in 250-mL shake flask and shake flask powders generated. The SF powders were resuspended in 50 mM Bis-Tris, pH 7.5 and 0.5 mM CuSO₄, with mild shaking, for 1.5 hours at room temperature. The resuspended SF Powders were diluted in 25 mM Bis-Tris, pH 7.5 prior to activity determination. The activity of the SF Powder was evaluated at 0.16-12.5 g/L SF Powder, 1 g/L horseradish peroxidase (HRP), 0.2 g/L catalase, 250 mM ethynyl glycerol phosphate, 50 mM Bis-Tris, pH 7.5. The reactions were set up using a similar procedure as described above.

TABLE 6-1
Improved Variants Relative to SEQ ID NO: 114

| SEQ ID NO: | Amino Acid Differences | FIOP Product Relative to |
|---|---|---|
| (nt/aa) | (Relative to SEQ ID NO: 114) | SEQ ID NO: 114 |
| 225/226 | V296A | +++ |
| 227/228 | T596R | +++ |
| 229/230 | R161C/W564S | +++ |
| 231/232 | K308G | ++ |
| 233/234 | P263V | ++ |
| 235/236 | Q373R | ++ |
| 237/238 | W564R | + |
| 239/240 | Q553T | + |
| 241/242 | S361T | + |
| 243/244 | T596V | + |
| 245/246 | S537V | + |
| 247/248 | Q481R/N597S | + |
| 249/250 | T221E | + |
| 251/252 | T221S | + |
| 253/254 | S570R | + |
| 255/256 | D518T | + |
| 257/258 | Q553S | + |
| 259/260 | P263E | + |

Levels of increased activity were determined relative to the reference polypeptide of SEQ ID NO: 114 and defined as follows: “+” 1.15 to 1.30, “++” >1.30, “+++” >1.40

### Example 7

[0253] Evolution and Screening of Engineered Polypeptides Derived from SEQ ID NO: 226 for Improved Galactose Oxidase Activity for the Formation of Ethynyl Glyceraldehyde Phosphate

[0254] The engineered polynucleotide (SEQ ID NO: 225) encoding the polypeptide with galactose oxidase activity of SEQ ID NO: 226 was used to generate the engineered polypeptides of Table 5-1. These polypeptides displayed improved galactose oxidase activity under the desired conditions (e.g., the formation of ethynyl glyceraldehyde phosphate) as compared to the starting polypeptide. The engineered polypeptides, having the amino acid sequences of even-numbered sequence identifiers were generated from the “backbone” amino acid sequence of SEQ ID NO: 226 as described, and identified using the HTP assay described below and analytical methods described in Table 2-2.

[0255] Directed evolution began with the polynucleotide set forth in SEQ ID NO: 225. Libraries of engineered polypeptides were generated using various well-known techniques (e.g., saturation mutagenesis, recombination of previously identified beneficial amino acid differences) and screened using HTP assay and analysis methods, as indicated.

[0256] The enzyme assay was carried out in a 96-well deep-well (2 mL) plates, in 100 μL total volume/well. The cell pellets were lysed with 50 mM Bis-Tris, pH 7.5 with 1 g/L lysozyme, 0.5 g/L PMBS, and 0.25 mM CUSO₄. The clarified lysates were diluted in 25 mM Bis-Tris, pH 7.5 prior to the assay. The reactions were carried out using 1% (v/v) HTP lysate, 250 mM ethynyl glycerol phosphate, 1 g/L horseradish peroxidase (HRP), 0.2 g/L catalase, and 2.5 μM CUSO₄ residual from the lysis buffer, 50 mM Bis-Tris, pH 7.5. The reactions were set up by adding the following: 1.) 80 μL of a mastermix solution containing 312.5 mM ethynyl glycerol phosphate, 1.25 g/L HRP, 0.25 g/L catalase, 62.5 mM Bis-Tris, pH 7.5, and 2.) 20 μL of 5 diluted HTP lysate. The reaction plate was heat-sealed and centrifuged briefly. The plates are then shaken at 600 rpm at 30° C. for 18-20 hours.

[0257] After the 18-20-hour incubation, 200 μL of 50 mM potassium phosphate, pH 7.5 were added into each well, and the plates were re-sealed and shaken for 10 minutes at room temperature. In new plates, diluted reactions, 50 μL, were mixed in 150 μL of 10 g/L O-benzylhydroxyl amine dissolved in methanol. The plates were sealed and shaken at room temperature for 20-30 minutes. The samples were diluted 2-fold in water prior to UPLC analysis.

[0258] Hit variants were grown in 250-mL shake flask and shake flask powders generated. The SF powders were resuspended in 50 mM Bis-Tris, pH 7.5 and 0.5 mM CUSO₄, with mild shaking, for 1.5 hours at room temperature. The resuspended SF Powders were diluted in 25 mM Bis-Tris, pH 7.5 prior to activity determination. The activity of the SF Powder was evaluated at 0.16-12.5 g/L SF Powder, 1 g/L horseradish peroxidase (HRP), 0.2 g/L catalase, 250 mM ethynyl glycerol phosphate, and 50 mM Bis-Tris, pH 7.5. The reactions were set up using a similar procedure as described above.

TABLE 7-1
Improved Variants Relative to SEQ ID NO: 226

| SEQ | | FIOP Product |
|---|---|---|
| ID NO: | Amino Acid Differences | Relative to |
| (nt/aa) | (Relative to SEQ ID NO: 226) | SEQ ID NO: 226 |
| 261/262 | S24D/K250V/D408E/S568Q/S570T | ++ |
| 263/264 | L69I | ++ |
| 265/266 | S24D/K367L/D408E/T596V | + |
| 267/268 | K250V/S570T | + |
| 269/270 | S24D/T309M/D408E/S570T | + |
| 271/272 | S24D/N47G/A382S/D408E/S570T | + |
| 273/274 | S24D/T596V | + |
| 275/276 | S24D/Q79T/K308G/K367L | + |
| 277/278 | S570T | + |
| 279/280 | S24D/T596V | + |
| 281/282 | S24D/K308G/T309M | + |
| 283/284 | K250V | + |
| 285/286 | H443S | + |
| 287/288 | S24D/K367L/S570T | + |
| 289/290 | S24D/K250V/K308G/T596V | + |
| 291/292 | T309M | + |

Levels of increased activity were determined relative to the reference polypeptide of SEQ ID NO: 226 and defined as follows: “+” 1.15 to 1.30, “++” >1.30

### Example 8

[0259] Evolution and Screening of Engineered Polypeptides Derived from SEQ ID NO: 262 for Improved Galactose Oxidase Activity for the Formation of Ethynyl Glyceraldehyde Phosphate

[0260] The engineered polynucleotide (SEQ ID NO: 261) encoding the polypeptide with galactose oxidase activity of SEQ ID NO: 262 was used to generate the engineered polypeptides of Table 5-1. These polypeptides displayed improved galactose oxidase activity under the desired conditions (e.g., the formation of ethynyl glyceraldehyde phosphate) as compared to the starting polypeptide. The engineered polypeptides, having the amino acid sequences of even-numbered sequence identifiers were generated from the “backbone” amino acid sequence of SEQ ID NO: 262 as described, and identified using the HTP assay described below and analytical methods described in Table 2-2.

[0261] Directed evolution began with the polynucleotide set forth in SEQ ID NO: 261. Libraries of engineered polypeptides were generated using various well-known techniques (e.g., saturation mutagenesis, recombination of previously identified beneficial amino acid differences) and screened using HTP assay and analysis methods as indicated.

[0262] The enzyme assay was carried out in a 96-well deep-well (2 mL) plates, in 100 μL total volume/well. The variants were tested under 3 different conditions. For the first conditions, the cell pellets were lysed with 50 mM Bis-Tris, pH 7.5 with 1 g/L lysozyme, and 0.5 g/L PMBS. The clarified lysates were diluted in 25 mM Bis-Tris, pH 7.5 prior to the assay. The reactions were carried out using 1% (v/v) HTP lysate, 250 mM ethynyl glycerol phosphate, 1 g/L horseradish peroxidase (HRP), 0.2 g/L catalase, 20 μM CuSO₄, and 50 mM Bis-Tris, pH 7.5. The reactions were set up by adding the following: 1.) 80 μL of a master mix solution containing 312.5 mM ethynyl glycerol phosphate, 1.25 g/L HRP, 0.25 g/L catalase, 25 μM CuSO₄, 62.5 mM Bis-Tris, pH 7.5, and 2.) 20 μL of 5% diluted HTP lysate. The reaction plate was heat-sealed and centrifuged briefly. The plates are then shaken at 600 rpm at 30° C. for 18-20 hours.

[0263] After the 18-20-hour incubation, 200 μL of 50 mM potassium phosphate, pH 7.5 were added into each well, and the plates were re-sealed and shaken for 10 minutes at room temperature. In new plates, diluted reactions, 50 μL, were mixed in 150 μL of 10 g/L O-benzylhydroxyl amine dissolved in methanol. The plates were sealed and shaken at room temperature for 20-30 minutes. The samples were diluted 2-fold in water prior to UPLC analysis.

[0264] Hit variants were grown in 250-mL shake flask and shake flask powders generated. The SF powders were resuspended in 50 mM Bis-Tris, pH 7.5 and 0.5 mM CuSO₄, with mild shaking, for 1.5 hours at room temperature. The resuspended SF Powders were diluted in 25 mM Bis-Tris, pH 7.5 prior to activity determination. The activity of the SF Powder was evaluated at 0.16-12.5 g/L SF Powder, 1 g/L horseradish peroxidase (HRP), 0.2 g/L catalase, 250 mM ethynyl glycerol phosphate, and 50 mM Bis-Tris, pH 7.5. The reactions were set up using a similar procedure as described above.

TABLE 8-1
Improved Variants Relative to SEQ ID NO: 262

| SEQ | | FIOP Activity- |
|---|---|---|
| ID NO: | Amino Acid Differences | no heat Relative to |
| (nt/aa) | (Relative to SEQ ID NO: 262) | SEQ ID NO: 262 |
| 293/294 | H335P/E408D | + |
| 295/296 | L338A | + |
| 297/298 | E408D | + |
| 299/300 | V318I | + |
| 301/302 | Q239M/E408D | + |

Levels of increased activity were determined relative to the reference polypeptide of SEQ ID NO: 262 and defined as follows: “+” 1.20 to 1.40

[0265] Variants were also tested for thermostability. The enzyme assay was carried out in a 96-well deep-well (2 mL) plates, in 100 μL total volume/well. The cell pellets were lysed in 25 mM Bis-Tris, pH 7.5, 1 g/L lysozyme, and 0.5 g/L PMBS, with shaking, at room temperature, for 2 hours. After clarification, lysates were transferred into a BioRad PCR plates, sealed, and incubated in thermocyclers at 33° C. for 1.5 hours prior to the assay. The reactions were carried out using 2.5% (v/v) heated HTP lysate, 250 mM ethynyl glycerol phosphate, 1 g/L horseradish peroxidase (HRP), 0.2 g/L catalase, 20 μM CuSO4, and 50 mM Bis-Tris, pH 7.5. The reactions were set up by adding the following: 1.) 80 μL of a master mix solution containing 312.5 mM ethynyl glycerol phosphate, 1.25 g/L HRP, 0.25 g/L catalase, 25 μM CuSO4, 62.5 mM Bis-Tris, pH 7.5, and 2.) 20 μL of 12.5% diluted HTP lysate. The reaction plate was heat-sealed and centrifuged briefly. The plates are then shaken at 600 rpm at 30° C. for 18-20 hours.

[0266] After the 18-20-hour incubation, 200 μL of 50 mM potassium phosphate, pH 7.5 were added into each well, and the plates were re-sealed and shaken for 10 minutes at room temperature. In new plates, diluted reactions, 50 μL, were mixed in 150 μL of 10 g/L O-benzylhydroxyl amine dissolved in methanol. The plates were sealed and shaken at room temperature for 20-30 minutes. The samples were diluted 2-fold in water prior to UPLC analysis.

[0267] Hit variants were grown in 250-mL shake flask and shake flask powders generated. The SF powders were resuspended in 50 mM Bis-Tris, pH 7.5 and 0.5 mM CuSO₄, with mild shaking, for 1.5 hours at room temperature. The resuspended SF Powders were diluted in 25 mM Bis-Tris, pH 7.5 prior to activity determination. The activity of the SF Powder was evaluated at 0.16-12.5 g/L SF Powder, 1 g/L horseradish peroxidase (HRP), 0.2 g/L catalase, 250 mM ethynyl glycerol phosphate, and 50 mM Bis-Tris, pH 7.5. The reactions were set up using a similar procedure as described above.

TABLE 8-2
Improved Variants Relative to SEQ ID NO: 262

| SEQ | | FIOP thermostability |
|---|---|---|
| ID NO: | Amino Acid Differences | at 33 C. Relative to |
| (nt/aa) | (Relative to SEQ ID NO: 262) | SEQ ID NO: 262 |
| 293/294 | H335P/E408D | ++ |
| 295/296 | L338A | + |
| 297/298 | E408D | + |

Levels of increased activity were determined relative to the reference polypeptide of SEQ ID NO: 262 and defined as follows: “+” 1.15 to 1.40, “++” >1.40

[0268] The thermostability of the variants in the presence of CuSO₄ was also evaluated. The enzyme assay was carried out in a 96-well deep-well (2 mL) plates, in 100 μL total volume/well. The cell pellets were lysed in 25 mM Bis-Tris, pH 7.5, 20 μM CuSO₄, 1 g/L lysozyme, and 0.5 g/L PMBS, with shaking, at room temperature, for 2 hours. After clarification, lysates were transferred into a BioRad PCR plates, sealed, and incubated in thermocyclers at 40° C. for 1.5 hours prior to the assay. The reactions were carried out using 5% (v/v) heated HTP lysate, 250 mM ethynyl glycerol phosphate, 1 g/L horseradish peroxidase (HRP), 0.2 g/L catalase, 20 μM CuSO₄, 50 mM Bis-Tris, pH 7.5. The reactions were set up by adding the following: 1.) 80 μL of a master mix solution containing 312.5 mM ethynyl glycerol phosphate, 1.25 g/L HRP, 0.25 g/L catalase, 25 μM CuSO₄, 62.5 mM Bis-Tris, pH 7.5, and 2.) 20 μL of 25% diluted HTP lysate. The reaction plate was heat-sealed and centrifuged briefly. The plates are then shaken at 600 rpm at 30° C. for 18-20 hours.

[0269] After the 18-20-hour incubation, 200 μL of 50 mM potassium phosphate, pH 7.5 were added into each well, and the plates were re-sealed and shaken for 10 minutes at room temperature. In new plates, diluted reactions, 50 μL, were mixed in 150 μL of 10 g/L O-benzylhydroxyl amine dissolved in methanol. The plates were sealed and shaken at room temperature for 20-30 minutes. The samples were diluted 2-fold in water prior to UPLC analysis.

[0270] Hit variants were grown in 250-mL shake flask and shake flask powders generated. The SF powders were resuspended in 50 mM Bis-Tris, pH 7.5 and 0.5 mM CuSO4, with mild shaking, for 1.5 hours at room temperature. The resuspended SF Powders were diluted in 25 mM Bis-Tris, pH 7.5 prior to activity determination. The activity of the SF Powder was evaluated at 0.16-12.5 g/L SF Powder, 1 g/L horseradish peroxidase (HRP), 0.2 g/L catalase, 250 mM ethynyl glycerol phosphate, 50 mM Bis-Tris, pH 7.5. The reactions were set up using a similar procedure as described above.

TABLE 8-3
Improved Variants Relative to SEQ ID NO: 262

| SEQ | | FIOP thermostability |
|---|---|---|
| ID NO: | Amino Acid Differences | at 40 C. Relative to |
| (nt/aa) | (Relative to SEQ ID NO: 262) | SEQ ID NO: 262 |
| 303/304 | Q239M/F291Y/E408D | ++ |
| 305/306 | F291Y/E408D | ++ |
| 307/308 | C28G/Q239M/F291Y/E408D | ++ |
| 309/310 | Q239L/E408D | ++ |
| 301/302 | Q239M/E408D | + |
| 293/294 | H335P/E408D | + |
| 311/312 | Q239M | + |
| 295/296 | L338A | + |
| 313/314 | F291Y | + |
| 315/316 | C28G/Q239M/Q274N/E408D | + |
| 317/318 | Q239M/Q274N/F291Y/Y359F/G513R | + |
| 299/300 | V318I | + |
| 319/320 | Q239M/E408D/H523P | + |
| 321/322 | C28G/Q239M | + |
| 297/298 | E408D | + |
| 323/324 | Q239L/Q274H/F291Y/E408D | + |
| 325/326 | Q239M/E408D | +++ |
| 327/328 | Q239M | + |
| 329/330 | C28G/Q239M/K371I/E408D | + |
| 331/332 | C28G/Q239M | + |
| 333/334 | C28G/K371I | + |

Levels of increased activity were determined relative to the reference polypeptide of SEQ ID NO: 262 and defined as follows: “+” 1.25 to 1.40, “++” >1.40, “+++” >1.50

[0271] All publications, patents, patent applications and other documents cited in this application are hereby incorporated by reference in their entireties for all purposes to the same extent as if each individual publication, patent, patent application or other document were individually indicated to be incorporated by reference for all purposes.

[0272] While various specific embodiments have been illustrated and described, it will be appreciated that various changes can be made without departing from the spirit and scope of the invention(s).

The application's sequence listing, which the Patent Office published only in electronic form, follows.

SEQUENCE LISTING (334 sequences)

SEQ ID NO: 1 - DNA, 1965 bp, Artificial Sequence
  Engineered variant of Galactose Oxidase from Fusarium graminearum
atggcatcagcgccgatcgggtccgccatcccgcgcaacaactgggccgttacatgcgattccgcccagagtgggaatgaatgtaacaaggcaattgacggtaataaagacacgttttggcacactttttatggtgccaacggagatcccaaaccgccgcacacctatacgatcgatatgaaaacaacgcaaaacgtgaatggcctttctgtactgccacgtcaggatggcaatcagaatggatggatcggacgtcacgaggtgtatttaagttctgatgggacgaattggggaagccctgtagcgtctgggtcctggtttgccgattccaccacaaagtactctaattttgagacacgtccggcccgttacgtgcgccttgtcgccattaccgaagccaatgggcaaccgtggacttcaattgccgagattaacgtatttcaagcgtctagttacactgccccgcagccgggcttggggcgctggggcccgacaatcgatcttcccattgttccagcggccgccgcaattgagccaacgagcggtcgtgtcttgatgtggagctcttatcgtaatgatgcttttgagggttctcctggcggtattacactgacgagctcatgggaccctagcactggaattgtatccgatcgcactgttaccgttaccaaacacgacatgttttgccccggtatctcgatggacgggaacggtcagatcgtggtcaccggtggtaatgatgcaaagaaaacttccttatatgattcgagctcagactcttggattccgggcccggatatgcaggtcgcgcgtgggtatcaatcaagtgcgactatgagtgatgggcgcgtatttacgattggcggcagtttttccggcggtgtattcgagaagaacggggaggtttactccccgagctcgaagacttggacttctctgccgaatgcaaaagttaaccccatgctgaccgccgataaacagggtttgtacaaaagcgataatcatgcttggctgtttgggtggaaaaaaggtagcgtcttccaagcaggtccaagtactgccatgaattggtattatacatctgggtccggggacgttaagagtgcagggaagcgtcagtcaaatcgcggagtagccccagacgccatgtgcggtaatgccgtaatgtacgacgcagtcaaaggcaaaattttgactttcgggggctcgcccgatttcgaagattcagatgcgactacaaatgcccatattatcacgctgggcgagcctggcacgtcgccgaatacggtatttgcgagcaatgggttatatttcgctcgtacctttcatacctcggtggtccttccggacgggagtaccttcatcacaggaggccagcgccgcggaatcccatttgaagatagcacacccgtgtttactccagagatctacgttcccgaacaagatactttttacaaacaaaacccgaatagtatcgttcgtgcctatcattccatcagcttgttgctgccggacggacgtgttttcaatggtggcggtggcttatgcggcgattgtactacgaaccactttgatgcgcaaatctttacgccgaattatctttacgatagcaacgggaacttagccactcgccctaaaatcacccgcacctcaacccagtcagtcaaggtcggcgggcgcatcaccatttcaactgactcttcaatctcgaaagcaagtttaattcgctacggaactgctactcacacggtgaacaccgatcagcgccgcatcccgttgacgttaacgaacaacggaggtaattcgtacagctttcaagttccgtcggacagcggggttgctcttccgggatactggatgttgttcgttatgaattccgctggtgtaccctccgttgcgtcgacgattcgtgttacccaggggggcgggggtagctggtctcacccacagttcgaaaagtgataa

SEQ ID NO: 2 - protein, 653 aa, Artificial Sequence
  Engineered variant of Galactose Oxidase from Fusarium graminearum
MASAPIGSAIPRNNWAVTCDSAQSGNECNKAIDGNKDTFWHTFYGANGDPKPPHTYTIDMKTTQNVNGLSVLPRQDGNQNGWIGRHEVYLSSDGTNWGSPVASGSWFADSTTKYSNFETRPARYVRLVAITEANGQPWTSIAEINVFQASSYTAPQPGLGRWGPTIDLPIVPAAAAIEPTSGRVLMWSSYRNDAFEGSPGGITLTSSWDPSTGIVSDRTVTVTKHDMFCPGISMDGNGQIVVTGGNDAKKTSLYDSSSDSWIPGPDMQVARGYQSSATMSDGRVFTIGGSFSGGVFEKNGEVYSPSSKTWTSLPNAKVNPMLTADKQGLYKSDNHAWLFGWKKGSVFQAGPSTAMNWYYTSGSGDVKSAGKRQSNRGVAPDAMCGNAVMYDAVKGKILTFGGSPDFEDSDATTNAHIITLGEPGTSPNTVFASNGLYFARTFHTSVVLPDGSTFITGGQRRGIPFEDSTPVFTPEIYVPEQDTFYKQNPNSIVRAYHSISLLLPDGRVFNGGGGLCGDCTTNHFDAQIFTPNYLYDSNGNLATRPKITRTSTQSVKVGGRITISTDSSISKASLIRYGTATHTVNTDQRRIPLTLTNNGGNSYSFQVPSDSGVALPGYWMLFVMNSAGVPSVASTIRVTQGGGGSWSHPQFEK

SEQ ID NO: 3 - DNA, 1953 bp, Artificial Sequence
  Engineered variant of Galactose Oxidase from Fusarium graminearum
atggcatcagcaccgatcggggtagccatcccgcgcaacaactgggccgttacatgcgattccgcccagagtgggaatgaatgcattaaggcaattgacggtaataaagacacgttttggcacactcaatatggtgtaaacggagatcccaaaccgccgcacaccatcacgatcgatatgaaaacagtacaaaacgtgaatggcctttctgtactgccacgtcaggatggcaatcagaatggatggatcggacgtcacgaggtgtatttaagttctgatggggtgaattggggatcgcctgtagcgtctgggtcctggtttgccgattccaccacaaagtactctaattttgagacacgtccggcccgttacgtgcgccttgtcgccattaccgaagccaatgggcaaccgtggacttcaattgccgagattaacgtatttcaggcgtctagttacactgccccgcagccgggcttggggcgctggggcccgacaatcgatcttcccattgtgccatcggccgccgcaatcgagccaacgagcggtcgtgtcttgatgtggagctcttatcgtcaggatgcgtttgaggactctcctggcggtattacactgacgagctcatgggaccctagcactggaattgtatccgatcgcactagtaccgttaccgggcacgacatgttttgccccggtatctcgatggacgggaacggtcagatcgtggtcagcggtggtaatgatgcaaagaaaacttccttatatgattcgagctcggactcttggattccgggcccggatatgcaggtcgcgcgtgggtataactcaagtgcgactatgagtgatgggcgcgtatttacgattggcggcagttattccggcggtcaagttgagaagaacggggaggtttactccccgagctcgaagacttggacttcgctgccgaatgcaaaagttaaccccatgctgaccgccgataaacggggtctgtaccgtagcgataatcatgcttggctgtttgggtggaaaaagggtagcgtcttccaagcaggtccaagtactgccatgaactggtattatacatctgggtcgggggacgttaagagtgcagggaagcgtcaatcagaccgcggagtagccccagacgccatgtgcggtaatgccgtaatgtacgacgcagtcaaaggcaaaattttgactttcgggggctcgcccgattatcaagattcagatgcgactacaaatgcccatattatcacgctgggcgagcctggcacgagtccgaatacggtatttgcgagtaatgggttactgttcgctcgtacctttcatacctcggtggtccttccggacgggagtgtattcatcacaggaggccagcagcgcggagttccactggaagatagcacacccgtatttactccagagatctacgttcccgaacaagatactttttacaaacaaaacccgaatagtatcgttcgtgcctatcattccatcagcttgttgctgccggacggacgtgttttcaatggtggcggtggcttatgcggcgattgtgagacgaaccactttgatgcgcaaatctttacgccgaattatctttacgatagcaacgggaacttagccactcgccctaaaatcacccgtacctcaacccagtcagtcgtggtcggcgggtggatcaccatttggactgacatgtcgatctcggccgcaagtttaattcgctacggaactgctactcacacggtgaacaccgatcagcgacgcatcggcttgacgttaacgaacaacggaggtaattcgtacagctttcaagttccgtcggacagcggggttgctcttccgggatactggatgttgttcgttatgaattccgctggtgtaccctccgttgcgtcgacgattaacgttacccagggccaaactggccaccatcaccatcaccattag

SEQ ID NO: 4 - protein, 650 aa, Artificial Sequence
  Engineered variant of Galactose Oxidase from Fusarium graminearum
MASAPIGVAIPRNNWAVTCDSAQSGNECIKAIDGNKDTFWHTQYGVNGDPKPPHTITIDMKTVQNVNGLSVLPRQDGNQNGWIGRHEVYLSSDGVNWGSPVASGSWFADSTTKYSNFETRPARYVRLVAITEANGQPWTSIAEINVFQASSYTAPQPGLGRWGPTIDLPIVPSAAAIEPTSGRVLMWSSYRQDAFEDSPGGITLTSSWDPSTGIVSDRTSTVTGHDMFCPGISMDGNGQIVVSGGNDAKKTSLYDSSSDSWIPGPDMQVARGYNSSATMSDGRVFTIGGSYSGGQVEKNGEVYSPSSKTWTSLPNAKVNPMLTADKRGLYRSDNHAWLFGWKKGSVFQAGPSTAMNWYYTSGSGDVKSAGKRQSDRGVAPDAMCGNAVMYDAVKGKILTFGGSPDYQDSDATTNAHIITLGEPGTSPNTVFASNGLLFARTFHTSVVLPDGSVFITGGQQRGVPLEDSTPVFTPEIYVPEQDTFYKQNPNSIVRAYHSISLLLPDGRVFNGGGGLCGDCETNHFDAQIFTPNYLYDSNGNLATRPKITRTSTQSVVVGGWITIWTDMSISAASLIRYGTATHTVNTDQRRIGLTLTNNGGNSYSFQVPSDSGVALPGYWMLFVMNSAGVPSVASTINVTQGQTGHHHHHH

SEQ ID NO: 5 - DNA, 1953 bp, Artificial Sequence
  Engineered variant of Galactose Oxidase from Fusarium graminearum
atggcatcagcaccgatcggggtagccatcccgcgcaacaactgggccgttacatgcgattccgcccagagtgggaatgaatgcattaaggcaattgacggtaataaagacacgttttggcacactcaatatggtgtaaacggagatcccaaaccgccgcacaccatcacgatcgatatgaaaacagtacaaaacgtgaatggcctttctgtactgccacgtcaggatggcaatcagaatggatggatcggacgtcacgaggtgtatttaagttctgatggggtgaattggggatcgcctgtagcgtctgggtcctggtttgccgattccaccacaaagtactctaattttgagacacgtccggcccgttacgtgcgccttgtcgccattaccgaagccaatgggcaaccgtggacttcaattgccgagattaacgtatttcaggcgtctagttacactgccccgcagccgggcttggggcgctggggcccgacaatcgatcttcccattgtgccatcggccgccgcaatcgagccaacgagcggtcgtgtcttgatgtggagctcttatcgtcaggatgcgtttcgtgactctcctggcggtattacactgacgagctcatgggaccctagcactggaattgtatccgatcgcactagtaccgttaccgggcacgacatgttttgccccggtatctcgatggacgggaacggtcagatcgtggtcagcggtggtaatgatgcaaagaaaacttccttatatgattcgagctcggactcttggattccgggcccggatatgcaggtcgcgcgtgggtataactcaagtgcgactatgagtgatgggcgcgtatttacgattggcggcagttatagtggcggtcaagttgagaagaacggggaggtttactccccgagctcgaagacttggacttcgctgccgaatgcaaaagttaaccccatgctgaccgccgataaacggggtctgtaccgtagcgataatcatgcttggctgtttgggtggaaaaagggtagcgtcttccaagcaggtccaagtactgccatgaactggtattatacatctgggtcgggggacgttaagagtgcagggaagcgtcaatcagaccgcggagtagccccagacgccatgtgcggtaatgccgtaatgtacgacgcagtcaaaggcaaaattttgactttcgggggctcgcccgattatcaagactcagatgcgactacaaatgcccatattatcacgctgggcgagcctggcacgagtccgaatacggtatttgcgagtaatgggttactgttcgctcgtacctttcatacctcggtggtccttccggacgggagtgtattcatcacaggaggccagcagcgcggagttccactggaagatagcacacccgtatttactccagagatctacgttcccgaacaagatactttttacaaacaaaacccgaatagtatcgttcgtgcctatcattcgatcagcttgttgctgccggacggacgtgttttcaatggtggcggtggcttatgcggcgattgtgagacgaaccactttgatgcgcaaatctttacgccgaattatctttacgatagcaacgggaacttagccactcgccctaaaatcacccgtacctcaacccagtcagtcgtggtcggcgggtggatcaccatttggactgacatgtcgatctcggccgcaagtttaattcgctacggaactgctactcacacggtgaacaccgatcagcgacgcatcggcttgacgttaacgaacaacggaggtaattcgtacagctttcaagttccgtcggacagcggggttgctcttccgggatactggatgttgttcgttatgaattccgctggtgtaccctccgttgcgtcgacgattaacgttacccagggccaaactggccaccatcaccatcaccattag

SEQ ID NO: 6 - protein, 650 aa, Artificial Sequence
  Engineered variant of Galactose Oxidase from Fusarium graminearum
MASAPIGVAIPRNNWAVTCDSAQSGNECIKAIDGNKDTFWHTQYGVNGDPKPPHTITIDMKTVQNVNGLSVLPRQDGNQNGWIGRHEVYLSSDGVNWGSPVASGSWFADSTTKYSNFETRPARYVRLVAITEANGQPWTSIAEINVFQASSYTAPQPGLGRWGPTIDLPIVPSAAAIEPTSGRVLMWSSYRQDAFRDSPGGITLTSSWDPSTGIVSDRTSTVTGHDMFCPGISMDGNGQIVVSGGNDAKKTSLYDSSSDSWIPGPDMQVARGYNSSATMSDGRVFTIGGSYSGGQVEKNGEVYSPSSKTWTSLPNAKVNPMLTADKRGLYRSDNHAWLFGWKKGSVFQAGPSTAMNWYYTSGSGDVKSAGKRQSDRGVAPDAMCGNAVMYDAVKGKILTFGGSPDYQDSDATTNAHIITLGEPGTSPNTVFASNGLLFARTFHTSVVLPDGSVFITGGQQRGVPLEDSTPVFTPEIYVPEQDTFYKQNPNSIVRAYHSISLLLPDGRVFNGGGGLCGDCETNHFDAQIFTPNYLYDSNGNLATRPKITRTSTQSVVVGGWITIWTDMSISAASLIRYGTATHTVNTDQRRIGLTLTNNGGNSYSFQVPSDSGVALPGYWMLFVMNSAGVPSVASTINVTQGQTGHHHHHH

SEQ ID NO: 7 - DNA, 1953 bp, Artificial Sequence
  Engineered variant of Galactose Oxidase from Fusarium graminearum
atggcatcagcaccgatcggggtagccatcccgcgcaacaactgggccgttacatgcgattccgcccagagtgggaatgaatgcattaaggcaattgacggtaataaagacacgttttggcacactcaatatggtgtaaacggagatcccaaaccgccgcacaccatcacgatcgatatgaaaacagtacaaaacgtgaatggcctttctgtactgccacgtcaggatggcaatcagaatggatggatcggacgtcacgaggtgtatttaagttctgatggggtgaattggggatcgcctgtagcgtctgggtcctggtttgccgattccaccacaaagtactctaattttgagacacgtccggcccgttacgtgcgccttgtcgccattaccgaagccaatgggcaaccgtggacttcaattgccgagattaacgtatttcaggcgtctagttacactgccccgcagccgggcttggggcgctggggcccgacaatcgatcttcccattgtgccatcggccgccgcaatcgagccaacgagcggtcgtgtcttgatgtggagctcttatcgtcaggatgcgtttcgtgactctcctggcggtattacactgacgagctcatgggaccctagcactggaattgtatccgatcgcactagtaccgttaccgggcacgacatgttttgccccggtatctcgatggacgggaacggtcagatcgtggtcagcggtggtaatgatgcaaagaaaacttccttatatgattcgagctcggactcttggattccgggcccggatatgcaggtcgcgcgtgggtataactcaagtgcgactatgagtgatgggcgcgtatttacgattggcggcagttattccggcggtcaagttgagaagaacggggaggtttactccccgagctcgaagacttggacttcgctgccgaatgcaaaagttaaccccatgctgaccgccgataaacggggtctgtaccgtagcgataatcatgcttggctgtttgggtggaaaaagggtagcgtcttccaagcaggtccaagtactgccatgaactggtattatacatctgggtcgggggacgttaagagtgcagggaagcgtcaatcagaccgcggagtagccccagacgccatgtgcggtaatgccgtaatgtacgacgcagtcaaaggcaaaattttgactttcgggggctcgcccgattatcaaaactcagatgcgactacaaatgcccatattatcacgctgggcgagcctggcacgagtccgaatacggtatttgcgagtaatgggttactgttcgctcgtacctttcatacctcggtggtccttccggacgggagtgtattcatcacaggaggccagcagcgcgcggttccactggaagatagcacacccgtatttactccagagatctacgttcccgaacaagatactttttacaaacaaaacccgaatagtatcgttcgtgcctatcattccatcagcttgttgctgccggacggacgtgttttcaatggtggcggtggcttatgcggcgattgtgagacgaaccactttgatgcgcaaatctttacgccgaattatctttacgatagcaacgggaacttagccactcgccctaaaatcacccgtacctcaacccagtcagtcgtggtcggcgggtggatcaccatttggactgacatgtcgatctcggccgcaagtttaattcgctacggaactgctactcacacggtgaacaccgatcagcgacgcatcggcttgacgttaacgaacaacggaggtaattcgtacagctttcaagttccgtcggacagcggggttgctcttccgggatactggatgttgttcgttatgaattccgctggtgtaccctccgttgcgtcgacgattaacgttacccagggccaaactggccaccatcaccatcaccattag

SEQ ID NO: 8 - protein, 650 aa, Artificial Sequence
  Engineered variant of Galactose Oxidase from Fusarium graminearum
MASAPIGVAIPRNNWAVTCDSAQSGNECIKAIDGNKDTFWHTQYGVNGDPKPPHTITIDMKTVQNVNGLSVLPRQDGNQNGWIGRHEVYLSSDGVNWGSPVASGSWFADSTTKYSNFETRPARYVRLVAITEANGQPWTSIAEINVFQASSYTAPQPGLGRWGPTIDLPIVPSAAAIEPTSGRVLMWSSYRQDAFRDSPGGITLTSSWDPSTGIVSDRTSTVTGHDMFCPGISMDGNGQIVVSGGNDAKKTSLYDSSSDSWIPGPDMQVARGYNSSATMSDGRVFTIGGSYSGGQVEKNGEVYSPSSKTWTSLPNAKVNPMLTADKRGLYRSDNHAWLFGWKKGSVFQAGPSTAMNWYYTSGSGDVKSAGKRQSDRGVAPDAMCGNAVMYDAVKGKILTFGGSPDYQNSDATTNAHIITLGEPGTSPNTVFASNGLLFARTFHTSVVLPDGSVFITGGQQRAVPLEDSTPVFTPEIYVPEQDTFYKQNPNSIVRAYHSISLLLPDGRVFNGGGGLCGDCETNHFDAQIFTPNYLYDSNGNLATRPKITRTSTQSVVVGGWITIWTDMSISAASLIRYGTATHTVNTDQRRIGLTLTNNGGNSYSFQVPSDSGVALPGYWMLFVMNSAGVPSVASTINVTQGQTGHHHHHH

SEQ ID NO: 9 - DNA, 1953 bp, Artificial Sequence
  Engineered variant of Galactose Oxidase from Fusarium graminearum
atggcatcagcaccgatcggggtagccatcccgcgcaacaactgggccgttacatgcgattccgcccagagtgggaatgaatgcattaaggcaattgacggtaataaagacacgttttggcacactcaatatggtgtaaacggagatcccaaaccgccgcacaccatcacgatcgatatgaaaacagtacaaaacgtgaatggcctttctgtactgccacgtcaggatggcaatcagaatggatggatcggacgtcacgaggtgtatttaagttctgatggggtgaattggggatcgcctgtagcgtctgggtcctggtttgccgattccaccacaaagtactctaattttgagacacgtccggcccgttacgtgcgccttgtcgccattaccgaagccaatgggcaaccgtggacttcaattgccgagattaacgtatttcaggcgtctagttacactgccccgcagccgggcttggggcgctggggcccgacaatcgatcttcccattgtgccatcggccgccgcaatcgagccaacgagcggtcgtgtcttgatgtggagctcttatcgtcaggatgcgtttcgtgactctcctggcggtattacactgacgagctcatgggaccctagcactggaattgtatccgatcgcactagtaccgttaccgggcacgacatgttttgccccggtatctcgatggacgggaacggtcagatcgtggtcagcggtggtaatgatgcaaagaaaacttccttatatgattcgagctcggactcttggattccgggcccggatatgcaggtcgcgcgtgggtataactcaagtgcgactatgagtgatgggcgcgtatttacgattggcggcagttatagtggcggtcaagttgagaagaacggggaggtttactccccgagctcgaagacttggacttcgctgccgaatgcaaaagttaaccccatgctgaccgccgataaacggggtctgtaccgtagcgataatcatgcttggctgtttgggtggaaaaagggtagcgtcttccaagcaggtccaagtactgccatgaactggtattatacatctgggtcgggggacgttaagagtgcagggaagcgtcaatcagaccgcggagtagccccagacgccatgtgcggtaatgccgtaatgtacgacgcagtcaaaggcaaaattttgactttcgggggctcgcccgattatcaagattcagatgcgactacaaatgcccatattatcacgctgggcgagcctggcacgagtccgaatacggtatttgcgagtaatgggttactgttcgctcgtacctaccatacctcggtggtccttccggacgggagtgtattcatcacaggaggccagcagcgcggggttccactggaagatagcacacccgtatttactccagagatctacgttcccgaacaagatactttttacaaacaaaacccgaatagtatcgttcgtgcctatcattcgatcagcttgttgctgccggacggacgtgttttcaatggtggcggtggcttatgcggcgattgtgagacgaaccactttgatgcgcaaatctttacgccgaattatctttacgatagcaacgggaacttagccactcgccctaaaatcacccgtacctcaacccagtcagtcgtggtcggcgggtggatcaccatttggactgacatgtcgatctcggccgcaagtttaattcgctacggaactgctactcacacggtgaacaccgatcagcgacgcatcggcttgacgttaacgaacaacggaggtaattcgtacagctttcaagttccgtcggacagcggggttgctcttccgggatactggatgttgttcgttatgaattccgctggtgtaccctccgttgcgtcgacgattaacgttacccagggccaaactggccaccatcaccatcaccattag

SEQ ID NO: 10 - protein, 650 aa, Artificial Sequence
  Engineered variant of Galactose Oxidase from Fusarium graminearum
MASAPIGVAIPRNNWAVTCDSAQSGNECIKAIDGNKDTFWHTQYGVNGDPKPPHTITIDMKTVQNVNGLSVLPRQDGNQNGWIGRHEVYLSSDGVNWGSPVASGSWFADSTTKYSNFETRPARYVRLVAITEANGQPWTSIAEINVFQASSYTAPQPGLGRWGPTIDLPIVPSAAAIEPTSGRVLMWSSYRQDAFRDSPGGITLTSSWDPSTGIVSDRTSTVTGHDMFCPGISMDGNGQIVVSGGNDAKKTSLYDSSSDSWIPGPDMQVARGYNSSATMSDGRVFTIGGSYSGGQVEKNGEVYSPSSKTWTSLPNAKVNPMLTADKRGLYRSDNHAWLFGWKKGSVFQAGPSTAMNWYYTSGSGDVKSAGKRQSDRGVAPDAMCGNAVMYDAVKGKILTFGGSPDYQDSDATTNAHIITLGEPGTSPNTVFASNGLLFARTYHTSVVLPDGSVFITGGQQRGVPLEDSTPVFTPEIYVPEQDTFYKQNPNSIVRAYHSISLLLPDGRVFNGGGGLCGDCETNHFDAQIFTPNYLYDSNGNLATRPKITRTSTQSVVVGGWITIWTDMSISAASLIRYGTATHTVNTDQRRIGLTLTNNGGNSYSFQVPSDSGVALPGYWMLFVMNSAGVPSVASTINVTQGQTGHHHHHH

SEQ ID NO: 11 - DNA, 1953 bp, Artificial Sequence
  Engineered variant of Galactose Oxidase from Fusarium graminearum
atggcatcagcaccgatcggggtagccatcccgcgcaacaactgggccgttacatgcgattccgcccagagtgggaatgaatgcattaaggcaattgacggtaataaagacacgttttggcacactcaatatggtgtaaacggagatcccaaaccgccgcacaccatcacgatcgatatgaaaacagtacaaaacgtgaatggcctttctgtactgccacgtcaggatggcaatcagaatggatggatcggacgtcacgaggtgtatttaagttctgatggggtgaattggggatcgcctgtagcgtctgggtcctggtttgccgattccaccacaaagtactctaattttgagacacgtccggcccgttacgtgcgccttgtcgccattaccgaagccaatgggcaaccgtggacttcaattgccgagattaacgtatttcaggcgtctagttacactgccccgcagccgggcttggggcgctggggcccgacaatcgatcttcccattgtgccatcggccgccgcaatcgagccaacgagcggtcgtgtcttgatgtggagctcttatcgtcaggatgcgtttgaggactctcctggcggtattacactgacgagctcatgggaccctagcactggaattgtatccgatcgcactagtaccgttaccgggcacgacatgttttgccccggtatctcgatggacgggaacggtcagatcgtggtcagcggtggtaatgatgcaaagaaaacttccttatatgattcgagctcggactcttggattccgggcccggatatgcaggtcgcgcgtgggtataactcaagtgcgactatgagtgatgggcgcgtatttacgattggcggcagttattccggcggtcaagttgagaagaacggggaggtttactccccgagctcgaagacttggacttcgctgccgaatgcaaaagttaaccccatgctgaccgccgataaacggggtctgtaccgtagcgataatcatgcttggctgtttgggtggaaaaagggtagcgtcttccaagcaggtccaagtactgccatgaactggtattatacatctgggtcgggggacgttaagagtgcagggaagcgtcaatcagaccgcggagtagccccagacgccatgtgcggtaatgccgtaatgtacgacgcagtcaaaggcaaaattttgactttcgggggctcgcccgattatcaagattcagatgcgactacaaatgcccatattatcacgctgggcgagcctggcacgagtccgaatacggtatttgcgagtaatgggttactgttcgctcgtacctaccatacctcggtggtccttccggacgggagtgtattcatcacaggaggccagcagcgcggagttccactggaagatagcacacccgtatttactccagagatctacgttcccgaacaagatactttttacaaacaaaacccgaatagtatcgttcgtgcctatcattccatcagcttgttgctgccggacggacgtgttttcaatggtggcggtggcttatgcggcgattgtgagacgaaccactttgatgcgcaaatctttacgccgaattatctttacgatagcaacgggaacttagccactcgccctaaaatcacccgtacctcaacccagtcagtcgtggtcggcgggtggatcaccatttggactgacatgtcgatctcggccgcaagtttaattcgctacggaactgctactcacacggtgaacaccgatcagcgacgcatcggcttgacgttaacgaacaacggaggtaattcgtacagctttcaagttccgtcggacagcggggttgctcttccgggatactggatgttgttcgttatgaattccgctggtgtaccctccgttgcgtcgacgattaacgttacccagggccaaactggccaccatcaccatcaccattag

SEQ ID NO: 12 - protein, 650 aa, Artificial Sequence
  Engineered variant of Galactose Oxidase from Fusarium graminearum
MASAPIGVAIPRNNWAVTCDSAQSGNECIKAIDGNKDTFWHTQYGVNGDPKPPHTITIDMKTVQNVNGLSVLPRQDGNQNGWIGRHEVYLSSDGVNWGSPVASGSWFADSTTKYSNFETRPARYVRLVAITEANGQPWTSIAEINVFQASSYTAPQPGLGRWGPTIDLPIVPSAAAIEPTSGRVLMWSSYRQDAFEDSPGGITLTSSWDPSTGIVSDRTSTVTGHDMFCPGISMDGNGQIVVSGGNDAKKTSLYDSSSDSWIPGPDMQVARGYNSSATMSDGRVFTIGGSYSGGQVEKNGEVYSPSSKTWTSLPNAKVNPMLTADKRGLYRSDNHAWLFGWKKGSVFQAGPSTAMNWYYTSGSGDVKSAGKRQSDRGVAPDAMCGNAVMYDAVKGKILTFGGSPDYQDSDATTNAHIITLGEPGTSPNTVFASNGLLFARTYHTSVVLPDGSVFITGGQQRGVPLEDSTPVFTPEIYVPEQDTFYKQNPNSIVRAYHSISLLLPDGRVFNGGGGLCGDCETNHFDAQIFTPNYLYDSNGNLATRPKITRTSTQSVVVGGWITIWTDMSISAASLIRYGTATHTVNTDQRRIGLTLTNNGGNSYSFQVPSDSGVALPGYWMLFVMNSAGVPSVASTINVTQGQTGHHHHHH

SEQ ID NO: 13 - DNA, 1953 bp, Artificial Sequence
  Engineered variant of Galactose Oxidase from Fusarium graminearum
atggcatcagcaccgatcggggtagccatcccgcgcaacaactgggccgttacatgcgattccgcccagagtgggaatgaatgcattaaggcaattgacggtaataaagacacgttttggcacactcaatatggtgtaaacggagatcccaaaccgccgcacaccatcacgatcgatatgaaaacagtacaaaacgtgaatggcctttctgtactgccacgtcaggatggcaatcagaatggatggatcggacgtcacgaggtgtatttaagttctgatggggtgaattggggatcgcctgtagcgtctgggtcctggtttgccgattccaccacaaagtactctaattttgagacacgtccggcccgttacgtgcgccttgtcgccattaccgaagccaatgggcaaccgtggacttcaattgccgagattaacgtatttcaggcgtctagttacactgccccgcagccgggcttggggcgctggggcccgacaatcgatcttcccattgtgccatcggccgccgcaatcgagccaacgagcggtcgtgtcttgatgtggagctcttatcgtcaggatgcgtttgaggactctcctggcggtattacactgacgagctcatgggaccctagcactggaattgtatccgatcgcactagtaccgttaccgggcacgacatgttttgccccggtatctcgatggacgggaacggtcagatcgtggtcagcggtggtaatgatgcaaagaaaacttccttatatgattcgagctcggactcttggattccgggcccggatatgcaggtcgcgcgtgggtataactcaagtgcgactatgagtgatgggcgcgtatttacgattggcggcagttattccggcggtcaagttgagaagaacggggaggtttactccccgagctcgaagacttggacttcgctgccgaatgcaaaagttaaccccatgctgaccgccgataaacggggttggtaccgtagcgataatcatgcttggctgtttgggtggaaaaagggtagcgtcttccaagcaggtccaagtactgccatgaactggtattatacatctgggtcgggggacgttaagagtgcagggaagcgtcaatcagaccgcggagtagccccagacgccatgtgcggtaatgccgtaatgtacgacgcagtcaaaggcaaaattttgactttcgggggctcgcccgattatcaagattcagatgcgactacaaatgcccatattatcacgctgggcgagcctggcacgagtccgaatacggtatttgcgagtaatgggttactgttcgctcgtacctttcatacctcggtggtccttccggacgggagtgtattcatcacaggaggccagcagcgcggagttccactggaagatagcacacccgtatttactccagagatctacgttcccgaacaagatactttttacaaacaaaacccgaatagtatcgttcgtgcctatcattccatcagcttgttgctgccggacggacgtgttttcaatggtggcggtggcttatgcggcgattgtgagacgaaccactttgatgcgcaaatctttacgccgaattatctttacgatagcaacgggaacttagccactcgccctaaaatcacccgtacctcaacccagtcagtcgtggtcggcgggtggatcaccatttggactgacatgtcgatctcggccgcaagtttaattcgctacggaactgctactcacacggtgaacaccgatcagcgacgcatcggcttgacgttaacgaacaacggaggtaattcgtacagctttcaagttccgtcggacagcggggttgctcttccgggatactggatgttgttcgttatgaattccgctggtgtaccctccgttgcgtcgacgattaacgttacccagggccaaactggccaccatcaccatcaccattag

SEQ ID NO: 14 - protein, 650 aa, Artificial Sequence
  Engineered variant of Galactose Oxidase from Fusarium graminearum
MASAPIGVAIPRNNWAVTCDSAQSGNECIKAIDGNKDTFWHTQYGVNGDPKPPHTITIDMKTVQNVNGLSVLPRQDGNQNGWIGRHEVYLSSDGVNWGSPVASGSWFADSTTKYSNFETRPARYVRLVAITEANGQPWTSIAEINVFQASSYTAPQPGLGRWGPTIDLPIVPSAAAIEPTSGRVLMWSSYRQDAFEDSPGGITLTSSWDPSTGIVSDRTSTVTGHDMFCPGISMDGNGQIVVSGGNDAKKTSLYDSSSDSWIPGPDMQVARGYNSSATMSDGRVFTIGGSYSGGQVEKNGEVYSPSSKTWTSLPNAKVNPMLTADKRGWYRSDNHAWLFGWKKGSVFQAGPSTAMNWYYTSGSGDVKSAGKRQSDRGVAPDAMCGNAVMYDAVKGKILTFGGSPDYQDSDATTNAHIITLGEPGTSPNTVFASNGLLFARTFHTSVVLPDGSVFITGGQQRGVPLEDSTPVFTPEIYVPEQDTFYKQNPNSIVRAYHSISLLLPDGRVFNGGGGLCGDCETNHFDAQIFTPNYLYDSNGNLATRPKITRTSTQSVVVGGWITIWTDMSISAASLIRYGTATHTVNTDQRRIGLTLTNNGGNSYSFQVPSDSGVALPGYWMLFVMNSAGVPSVASTINVTQGQTGHHHHHH

SEQ ID NO: 15 - DNA, 1953 bp, Artificial Sequence
  Engineered variant of Galactose Oxidase from Fusarium graminearum
atggcatcagcaccgatcggggtagccatcccgcgcaacaactgggccgttacatgcgattccgcccagagtgggaatgaatgcattaaggcaattgacggtaataaagacacgttttggcacactcaatatggtgtaaacggagatcccaaaccgccgcacaccatcacgatcgatatgaaaacagtacaaaacgtgaatggcctttctgtactgccacgtcaggatggcaatcagaatggatggatcggacgtcacgaggtgtatttaagttctgatggggtgaattggggatcgcctgtagcgtctgggtcctggtttgccgattccaccacaaagtactctaattttgagacacgtccggcccgttacgtgcgccttgtcgccattaccgaagccaatgggcaaccgtggacttcaattgccgagattaacgtatttcaggcgtctagttacactgccccgcagccgggcttggggcgctggggcccgacaatcgatcttcccattgtgccatcggccgccgcaatcgagccaacgagcggtcgtgtcttgatgtggagctcttatcgtcaggatgcgtttcgtgactctcctggcggtattacactgacgagctcatgggaccctagcactggaattgtatccgatcgcactagtaccgttaccgggcacgacatgttttgccccggtatctcgatggacgggaacggtcagatcgtggtcagcggtggtaatgatgcaaagaaaacttccttatatgattcgagctcggactcttggattccgggcccggatatgcaggtcgcgcgtgggtataactcaagtgcgactatgagtgatgggcgcgtatttacgattggcggcagttatagtggcggtcaagttgagaagaacggggaggtttactccccgagctcgaagacttggacttcgctgccgaatgcaaaagttaaccccatgctgaccgccgataaactgggtctgtatcgtagcgataatcatgcttggctgtttgggtggaaaaagggtagcgtcttccaagcaggtccaagtactgccatgaactggtattatacatctgggtcgggggacgttaagagtgcagggaagcgtcaatcagaccgcggagtagccccagacgccatgtgcggtaatgccgtaatgtacgacgcagtcaaaggcaaaattttgactttcgggggctcgcccgattatcaagactcagatgcgactacaaatgcccatattatcacgctgggcgagcctggcacgagtccgaatacggtatttgcgagtaatgggttactgttcgctcgtacctttcatacctcggtggtccttccggacgggagtgtattcatcacaggaggccagcagcgcggggttccactggaagatagcacacccgtatttactccagagatctacgttcccgaacaagatactttttacaaacaaaacccgaatagtatcgttcgtgcctatcattccatcagcttgttgctgccggacggacgtgttttcaatggtggcggtggcttatgcggcgattgtgagacgaaccactttgatgcgcaaatctttacgccgaattatctttacgatagcaacgggaacttagccactcgccctaaaatcacccgtacctcaacccagtcagtcgtggtcggcgggtggatcaccatttggactgacatgtcgatctcggccgcaagtttaattcgctacggaactgctactcacacggtgaacaccgatcagcgacgcatcggcttgacgttaacgaacaacggaggtaattcgtacagctttcaagttccgtcggacagcggggttgctcttccgggatactggatgttgttcgttatgaattccgctggtgtaccctccgttgcgtcgacgattaacgttacccagggccaaactggccaccatcaccatcaccattag

SEQ ID NO: 16 - protein, 650 aa, Artificial Sequence
  Engineered variant of Galactose Oxidase from Fusarium graminearum
MASAPIGVAIPRNNWAVTCDSAQSGNECIKAIDGNKDTFWHTQYGVNGDPKPPHTITIDMKTVQNVNGLSVLPRQDGNQNGWIGRHEVYLSSDGVNWGSPVASGSWFADSTTKYSNFETRPARYVRLVAITEANGQPWTSIAEINVFQASSYTAPQPGLGRWGPTIDLPIVPSAAAIEPTSGRVLMWSSYRQDAFRDSPGGITLTSSWDPSTGIVSDRTSTVTGHDMFCPGISMDGNGQIVVSGGNDAKKTSLYDSSSDSWIPGPDMQVARGYNSSATMSDGRVFTIGGSYSGGQVEKNGEVYSPSSKTWTSLPNAKVNPMLTADKLGLYRSDNHAWLFGWKKGSVFQAGPSTAMNWYYTSGSGDVKSAGKRQSDRGVAPDAMCGNAVMYDAVKGKILTFGGSPDYQDSDATTNAHIITLGEPGTSPNTVFASNGLLFARTFHTSVVLPDGSVFITGGQQRGVPLEDSTPVFTPEIYVPEQDTFYKQNPNSIVRAYHSISLLLPDGRVFNGGGGLCGDCETNHFDAQIFTPNYLYDSNGNLATRPKITRTSTQSVVVGGWITIWTDMSISAASLIRYGTATHTVNTDQRRIGLTLTNNGGNSYSFQVPSDSGVALPGYWMLFVMNSAGVPSVASTINVTQGQTGHHHHHH

SEQ ID NO: 17 - DNA, 1953 bp, Artificial Sequence
  Engineered variant of Galactose Oxidase from Fusarium graminearum
atggcatcagcaccgatcggggtagccatcccgcgcaacaactgggccgttacatgcgattccgcccagagtgggaatgaatgcattaaggcaattgacggtaataaagacacgttttggcacactcaatatggtgtaaacggagatcccaaaccgccgcacaccatcacgatcgatatgaaaacagtacaaaacgtgaatggcctttctgtactgccacgtcaggatggcaatcagaatggatggatcggacgtcacgaggtgtatttaagttctgatggggtgaattggggatcgcctgtagcgtctgggtcctggtttgccgattccaccacaaagtactctaattttgagacacgtccggcccgttacgtgcgccttgtcgccattaccgaagccaatgggcaaccgtggacttcaattgccgagattaacgtatttcaggcgtctagttacactgccccgcagccgggcttggggcgctggggcccgacaatcgatcttcccattgtgccatcggccgccgcaatcgagccaacgagcggtcgtgtcttgatgtggagctcttatcgtcaggatgcgtttgaggactctcctggcggtattacactgacgagctcatgggaccctagcactggaattgtatccgatcgcactagtaccgttaccgggcacgacatgttttgccccggtatctcgatggacgggaacggtcagatcgtggtcagcggtggtaatgatgcaaagaaaacttccttatatgattcgagctcggactcttggattccgggcccggatatgcaggtcgcgcgtgggtataactcaagtgcgactatgagtgatgggcgcgtatttacgattggcggcagttatcgcggcggtcaagttgagaagaacggggaggtttactccccgagctcgaagacttggacttcgctgccgaatgcaaaagttaaccccatgctgaccgccgataaacggggtctgtaccgtagcgataatcatgcttggctgtttgggtggaaaaagggtagcgtcttccaagcaggtccaagtactgccatgaactggtattatacatctgggtcgggggacgttaagagtgcagggaagcgtcaatcagaccgcggagtagccccagacgccatgtgcggtaatgccgtaatgtacgacgcagtcaaaggcaaaattttgactttcgggggctcgcccgattatcaagattcagatgcgactacaaatgcccatattatcacgctgggcgagcctggcacgagtccgaatacggtatttgcgagtaatgggttactgttcgctcgtacctttcatacctcggtggtccttccggacgggagtgtattcatcacaggaggccagcagcgcggagttccactggaagatagcacacccgtatttactccagagatctacgttcccgaacaagatactttttacaaacaaaacccgaatagtatcgttcgtgcctatcattccatcagcttgttgctgccggacggacgtgttttcaatggtggcggtggcttatgcggcgattgtgagacgaaccactttgatgcgcaaatctttacgccgaattatctttacgatagcaacgggaacttagccactcgccctaaaatcacccgtacctcaacccagtcagtcgtggtcggcgggtggatcaccatttggactgacatgtcgatctcggccgcaagtttaattcgctacggaactgctactcacacggtgaacaccgatcagcgacgcatcggcttgacgttaacgaacaacggaggtaattcgtacagctttcaagttccgtcggacagcggggttgctcttccgggatactggatgttgttcgttatgaattccgctggtgtaccctccgttgcgtcgacgattaacgttacccagggccaaactggccaccatcaccatcaccattag

SEQ ID NO: 18 - protein, 650 aa, Artificial Sequence
  Engineered variant of Galactose Oxidase from Fusarium graminearum
MASAPIGVAIPRNNWAVTCDSAQSGNECIKAIDGNKDTFWHTQYGVNGDPKPPHTITIDMKTVQNVNGLSVLPRQDGNQNGWIGRHEVYLSSDGVNWGSPVASGSWFADSTTKYSNFETRPARYVRLVAITEANGQPWTSIAEINVFQASSYTAPQPGLGRWGPTIDLPIVPSAAAIEPTSGRVLMWSSYRQDAFEDSPGGITLTSSWDPSTGIVSDRTSTVTGHDMFCPGISMDGNGQIVVSGGNDAKKTSLYDSSSDSWIPGPDMQVARGYNSSATMSDGRVFTIGGSYRGGQVEKNGEVYSPSSKTWTSLPNAKVNPMLTADKRGLYRSDNHAWLFGWKKGSVFQAGPSTAMNWYYTSGSGDVKSAGKRQSDRGVAPDAMCGNAVMYDAVKGKILTFGGSPDYQDSDATTNAHIITLGEPGTSPNTVFASNGLLFARTFHTSVVLPDGSVFITGGQQRGVPLEDSTPVFTPEIYVPEQDTFYKQNPNSIVRAYHSISLLLPDGRVFNGGGGLCGDCETNHFDAQIFTPNYLYDSNGNLATRPKITRTSTQSVVVGGWITIWTDMSISAASLIRYGTATHTVNTDQRRIGLTLTNNGGNSYSFQVPSDSGVALPGYWMLFVMNSAGVPSVASTINVTQGQTGHHHHHH

SEQ ID NO: 19 - DNA, 1953 bp, Artificial Sequence
  Engineered variant of Galactose Oxidase from Fusarium graminearum
atggcatcagcaccgatcggggtagccatcccgcgcaacaactgggccgttacatgcgattccgcccagagtgggaatgaatgcattaaggcaattgacggtaataaagacacgttttggcacactcaatatggtgtaaacggagatcccaaaccgccgcacaccatcacgatcgatatgaaaacagtacaaaacgtgaatggcctttctgtactgccacgtcaggatggcaatcagaatggatggatcggacgtcacgaggtgtatttaagttctgatggggtgaattggggatcgcctgtagcgtctgggtcctggtttgccgattccaccacaaagtactctaattttgagacacgtccggcccgttacgtgcgccttgtcgccattaccgaagccaatgggcaaccgtggacttcaattgccgagattaacgtatttcaggcgtctagttacactgccccgcagccgggcttggggcgctggggcccgacaatcgatcttcccattgtgccatcggccgccgcaatcgagccaacgagcggtcgtgtcttgatgtggagctcttatcgtcaggatgcgtttgaggactctcctggcggtattacactgacgagctcatgggaccctagcactggaattgtatccgatacgactagtaccgttaccgggcacgacatgttttgccccggtatctcgatggacgggaacggtcagatcgtggtcagcggtggtaatgatgcaaagaaaacttccttatatgattcgagctcggactcttggattccgggcccggatatgcaggtcgcgcgtgggtataactcaagtgcgactatgagtgatgggcgcgtatttacgattggcggcagttattccggcggtcaagttgagaagaacggggaggtttactccccgagctcgaagacttggacttcgctgccgaatgcaaaagttaaccccatgctgaccgccgataaacggggtctgtaccgtagcgataatcatgcttggctgtttgggtggaaaaagggtagcgtcttccaagcaggtccaagtactgccatgaactggtattatacatctgggtcgggggacgttaagagtgcagggaagcgtcaatcagaccgcggagtagccccagacgccatgtgcggtaatgccgtaatgtacgacgcagtcaaaggcaaaattttgactttcgggggctcgcccgattatcaagattcagatgcgactacaaatgcccatattatcacgctgggcgagcctggcacgagtccgaatacggtatttgcgagtaatgggttactgttcgctcgtacctttcatacctcggtggtccttccggacgggagtgtattcatcacaggaggccagcagcgcggagttccactggaagatagcacacccgtatttactccagagatctacgttcccgaacaagatactttttacaaacaaaacccgaatagtatcgttcgtgcctatcattccatcagcttgttgctgccggacggacgtgttttcaatggtggcggtggcttatgcggcgattgtgagacgaaccactttgatgcgcaaatctttacgccgaattatctttacgatagcaacgggaacttagccactcgccctaaaatcacccgtacctcaacccagtcagtcgtggtcggcgggtggatcaccatttggactgacatgtcgatctcggccgcaagtttaattcgctacggaactgctactcacacggtgaacaccgatcagcgacgcatcggcttgacgttaacgaacaacggaggtaattcgtacagctttcaagttccgtcggacagcggggttgctcttccgggatactggatgttgttcgttatgaattccgctggtgtaccctccgttgcgtcgacgattaacgttacccagggccaaactggccaccatcaccatcaccattag

SEQ ID NO: 20 - protein, 650 aa, Artificial Sequence
  Engineered variant of Galactose Oxidase from Fusarium graminearum
MASAPIGVAIPRNNWAVTCDSAQSGNECIKAIDGNKDTFWHTQYGVNGDPKPPHTITIDMKTVQNVNGLSVLPRQDGNQNGWIGRHEVYLSSDGVNWGSPVASGSWFADSTTKYSNFETRPARYVRLVAITEANGQPWTSIAEINVFQASSYTAPQPGLGRWGPTIDLPIVPSAAAIEPTSGRVLMWSSYRQDAFEDSPGGITLTSSWDPSTGIVSDTTSTVTGHDMFCPGISMDGNGQIVVSGGNDAKKTSLYDSSSDSWIPGPDMQVARGYNSSATMSDGRVFTIGGSYSGGQVEKNGEVYSPSSKTWTSLPNAKVNPMLTADKRGLYRSDNHAWLFGWKKGSVFQAGPSTAMNWYYTSGSGDVKSAGKRQSDRGVAPDAMCGNAVMYDAVKGKILTFGGSPDYQDSDATTNAHIITLGEPGTSPNTVFASNGLLFARTFHTSVVLPDGSVFITGGQQRGVPLEDSTPVFTPEIYVPEQDTFYKQNPNSIVRAYHSISLLLPDGRVFNGGGGLCGDCETNHFDAQIFTPNYLYDSNGNLATRPKITRTSTQSVVVGGWITIWTDMSISAASLIRYGTATHTVNTDQRRIGLTLTNNGGNSYSFQVPSDSGVALPGYWMLFVMNSAGVPSVASTINVTQGQTGHHHHHH

SEQ ID NO: 21 - DNA, 1953 bp, Artificial Sequence
  Engineered variant of Galactose Oxidase from Fusarium graminearum
atggcatcagcaccgatcggggtagccatcccgcgcaacaactgggccgttacatgcgattccgcccagagtgggaatgaatgcattaaggcaattgacggtaataaagacacgttttggcacactcaatatggtgtaaacggagatcccaaaccgccgcacaccatcacgatcgatatgaaaacagtacaaaacgtgaatggcctttctgtactgccacgtcaggatggcaatcagaatggatggatcggacgtcacgaggtgtatttaagttctgatggggtgaattggggatcgcctgtagcgtctgggtcctggtttgccgattccaccacaaagtactctaattttgagacacgtccggcccgttacgtgcgccttgtcgccattaccgaagccaatgggcaaccgtggacttcaattgccgagattaacgtatttcaggcgtctagttacactgccccgcagccgggcttggggcgctggggcccgacaatcgatcttcccattgtgccatcggccgccgcaatcgagccaacgagcggtcgtgtcttgatgtggagctcttatcgtcaggatgcgtttcaggactctcctggcggtattacactgacgagctcatgggaccctagcactggaattgtatccgatcgcactagtaccgttaccgggcacgacatgttttgccccggtatctcgatggacgggaacggtcagatcgtggtcagcggtggtaatgatgcaaagaaaacttccttatatgattcgagctcggactcttggattccgggcccggatatgcaggtcgcgcgtgggtataactcaagtgcgactatgagtgatgggcgcgtatttacgattggcggcagttattccggcggtcaagttgagaagaacggggaggtttactccccgagctcgaagacttggacttcgctgccgaatgcaaaagttaaccccatgctgaccgccgataaacggggtctgtaccgtagcgataatcatgcttggctgtttgggtggaaaaagggtagcgtcttccaagcaggtccaagtactgccatgaactggtattatacatctgggtcgggggacgttaagagtgcagggaagcgtcaatcagaccgcggagtagccccagacgccatgtgcggtaatgccgtaatgtacgacgcagtcaaaggcaaaattttgactttcgggggctcgcccgattatcaagattcagatgcgactacaaatgcccatattatcacgctgggcgagcctggcacgagtccgaatacggtatttgcgagtaatgggttactgttcgctcgtacctttcatacctcggtggtccttccggacgggagtgtattcatcacaggaggccagcagcgcggagttccactggaagatagcacacccgtatttactccagagatctacgttcccgaacaagatactttttacaaacaaaacccgaatagtatcgttcgtgcctatcattccatcagcttgttgctgccggacggacgtgttttcaatggtggcggtggcttatgcggcgattgtgagacgaaccactttgatgcgcaaatctttacgccgaattatctttacgatagcaacgggaacttagccactcgccctaaaatcacccgtacctcaacccagtcagtcgtggtcggcgggtggatcaccatttggactgacatgtcgatctcggccgcaagtttaattcgctacggaactgctactcacacggtgaacaccgatcagcgacgcatcggcttgacgttaacgaacaacggaggtaattcgtacagctttcaagttccgtcggacagcggggttgctcttccgggatactggatgttgttcgttatgaattccgctggtgtaccctccgttgcgtcgacgattaacgttacccagggccaaactggccaccatcaccatcaccattag

SEQ ID NO: 22 - protein, 650 aa, Artificial Sequence
  Engineered variant of Galactose Oxidase from Fusarium graminearum
MASAPIGVAIPRNNWAVTCDSAQSGNECIKAIDGNKDTFWHTQYGVNGDPKPPHTITIDMKTVQNVNGLSVLPRQDGNQNGWIGRHEVYLSSDGVNWGSPVASGSWFADSTTKYSNFETRPARYVRLVAITEANGQPWTSIAEINVFQASSYTAPQPGLGRWGPTIDLPIVPSAAAIEPTSGRVLMWSSYRQDAFQDSPGGITLTSSWDPSTGIVSDRTSTVTGHDMFCPGISMDGNGQIVVSGGNDAKKTSLYDSSSDSWIPGPDMQVARGYNSSATMSDGRVFTIGGSYSGGQVEKNGEVYSPSSKTWTSLPNAKVNPMLTADKRGLYRSDNHAWLFGWKKGSVFQAGPSTAMNWYYTSGSGDVKSAGKRQSDRGVAPDAMCGNAVMYDAVKGKILTFGGSPDYQDSDATTNAHIITLGEPGTSPNTVFASNGLLFARTFHTSVVLPDGSVFITGGQQRGVPLEDSTPVFTPEIYVPEQDTFYKQNPNSIVRAYHSISLLLPDGRVFNGGGGLCGDCETNHFDAQIFTPNYLYDSNGNLATRPKITRTSTQSVVVGGWITIWTDMSISAASLIRYGTATHTVNTDQRRIGLTLTNNGGNSYSFQVPSDSGVALPGYWMLFVMNSAGVPSVASTINVTQGQTGHHHHHH

SEQ ID NO: 23 - DNA, 1953 bp, Artificial Sequence
  Engineered variant of Galactose Oxidase from Fusarium graminearum
atggcatcagcaccgatcggggtagccatcccgcgcaacaactgggccgttacatgcgattccgcccagagtgggaatgaatgcattaaggcaattgacggtaataaagacacgttttggcacactcaatatggtgtaaacggagatcccaaaccgccgcacaccatcacgatcgatatgaaaacagtacaaaacgtgaatggcctttctgtactgccacgtcaggatggcaatcagaatggatggatcggacgtcacgaggtgtatttaagttctgatggggtgaattggggatcgcctgtagcgtctgggtcctggtttgccgattccaccacaaagtactctaattttgagacacgtccggcccgttacgtgcgccttgtcgccattaccgaagccaatgggcaaccgtggacttcaattgccgagattaacgtatttcaggcgtctagttacactgccccgcagccgggcttggggcgctggggcccgacaatcgatcttcccattgtgccatcggccgccgcaatcgagccaacgagcggtcgtgtcttgatgtggagctcttatcgtcaggatgcgtttgaggactctcctggcggtattacactgacgagctcatgggaccctagcactggaattgtatccgatcgcactagtaccgttaccgggcacgacatgttttgccccggtatctcgatggacgggaacggtcagatcgtggtcagcggtggtaatgatgcaaagaaaacttccttatatgattcgagctcggactcttggattccgggcccggatatgcaggtcgcgcgtgggtataactcaagtgcgactatgagtgatgggcgcgtatttacgattggcggcagttattccggcggtcaagttgagaagaacggggaggtttactccccgagctcgaagacttggacttcgctgccgaatgcaaaagttaaccccatgctgaccgccgataaacggggtctgtaccgtagcgataatcatgcttggctgtttgggtggaaaaagggtagcgtcttccaagcaggtccaagtactgccatgaactggtattatacatctgggtcgggggacgttaagagtgcagggaagcgtcaatcagaccgcggagtagccccagacgccatgtgcggtaatgccgtaatgtacgacgcagtcaaaggcaaaattttgactttcgggggctcgcccgattatcaaaactcagatgcgactacaaatgcccatattatcacgctgggcgagcctggcacgagtccgaatacggtatttgcgagtaatgggttactgttcgctcgtacctttcatacctcggtggtccttccggacgggagtgtattcatcacaggaggccagcagcgcggagttccactggaagatagcacacccgtatttactccagagatctacgttcccgaacaagatactttttacaaacaaaacccgaatagtatcgttcgtgcctatcattccatcagcttgttgctgccggacggacgtgttttcaatggtggcggtggcttatgcggcgattgtgagacgaaccactttgatgcgcaaatctttacgccgaattatctttacgatagcaacgggaacttagccactcgccctaaaatcacccgtacctcaacccagtcagtcgtggtcggcgggtggatcaccatttggactgacatgtcgatctcggccgcaagtttaattcgctacggaactgctactcacacggtgaacaccgatcagcgacgcatcggcttgacgttaacgaacaacggaggtaattcgtacagctttcaagttccgtcggacagcggggttgctcttccgggatactggatgttgttcgttatgaattccgctggtgtaccctccgttgcgtcgacgattaacgttacccagggccaaactggccaccatcaccatcaccattag

SEQ ID NO: 24 - protein, 650 aa, Artificial Sequence
  Engineered variant of Galactose Oxidase from Fusarium graminearum
MASAPIGVAIPRNNWAVTCDSAQSGNECIKAIDGNKDTFWHTQYGVNGDPKPPHTITIDMKTVQNVNGLSVLPRQDGNQNGWIGRHEVYLSSDGVNWGSPVASGSWFADSTTKYSNFETRPARYVRLVAITEANGQPWTSIAEINVFQASSYTAPQPGLGRWGPTIDLPIVPSAAAIEPTSGRVLMWSSYRQDAFEDSPGGITLTSSWDPSTGIVSDRTSTVTGHDMFCPGISMDGNGQIVVSGGNDAKKTSLYDSSSDSWIPGPDMQVARGYNSSATMSDGRVFTIGGSYSGGQVEKNGEVYSPSSKTWTSLPNAKVNPMLTADKRGLYRSDNHAWLFGWKKGSVFQAGPSTAMNWYYTSGSGDVKSAGKRQSDRGVAPDAMCGNAVMYDAVKGKILTFGGSPDYQNSDATTNAHIITLGEPGTSPNTVFASNGLLFARTFHTSVVLPDGSVFITGGQQRGVPLEDSTPVFTPEIYVPEQDTFYKQNPNSIVRAYHSISLLLPDGRVFNGGGGLCGDCETNHFDAQIFTPNYLYDSNGNLATRPKITRTSTQSVVVGGWITIWTDMSISAASLIRYGTATHTVNTDQRRIGLTLTNNGGNSYSFQVPSDSGVALPGYWMLFVMNSAGVPSVASTINVTQGQTGHHHHHH

SEQ ID NO: 25 - DNA, 1953 bp, Artificial Sequence
  Engineered variant of Galactose Oxidase from Fusarium graminearum
atggcatcagcaccgatcggggtagccatcccgcgcaacaactgggccgttacatgcgattccgcccagagtgggaatgaatgcattaaggcaattgacggtaataaagacacgttttggcacactcaatatggtgtaaacggagatcccaaaccgccgcacaccatcacgatcgatatgaaaacagtacaaaacgtgaatggcctttctgtactgccacgtcaggatggcaatcagaatggatggatcggacgtcacgaggtgtatttaagttctgatggggtgaattggggatcgcctgtagcgtctgggtcctggtttgccgattccaccacaaagtactctaattttgagacacgtccggcccgttacgtgcgccttgtcgccattaccgaagccaatgggcaaccgtggacttcaattgccgagattaacgtatttcaggcgtctagttacactgccccgcagccgggcttggggcgctggggcccgacaatcgatcttcccattgtgccatcggccgccgcaatcgagccaacgagcggtcgtgtcttgatgtggagctcttatcgtcaggatgcgtttgaggactctcctggcggtattacactgacgagctcatgggaccctagcactggaattgtatccgatgttactagtaccgttaccgggcacgacatgttttgccccggtatctcgatggacgggaacggtcagatcgtggtcagcggtggtaatgatgcaaagaaaacttccttatatgattcgagctcggactcttggattccgggcccggatatgcaggtcgcgcgtgggtataactcaagtgcgactatgagtgatgggcgcgtatttacgattggcggcagttattccggcggtcaagttgagaagaacggggaggtttactccccgagctcgaagacttggacttcgctgccgaatgcaaaagttaaccccatgctgaccgccgataaacggggtctgtaccgtagcgataatcatgcttggctgtttgggtggaaaaagggtagcgtcttccaagcaggtccaagtactgccatgaactggtattatacatctgggtcgggggacgttaagagtgcagggaagcgtcaatcagaccgcggagtagccccagacgccatgtgcggtaatgccgtaatgtacgacgcagtcaaaggcaaaattttgactttcgggggctcgcccgattatcaagattcagatgcgactacaaatgcccatattatcacgctgggcgagcctggcacgagtccgaatacggtatttgcgagtaatgggttactgttcgctcgtacctttcatacctcggtggtccttccggacgggagtgtattcatcacaggaggccagcagcgcggagttccactggaagatagcacacccgtatttactccagagatctacgttcccgaacaagatactttttacaaacaaaacccgaatagtatcgttcgtgcctatcattccatcagcttgttgctgccggacggacgtgttttcaatggtggcggtggcttatgcggcgattgtgagacgaaccactttgatgcgcaaatctttacgccgaattatctttacgatagcaacgggaacttagccactcgccctaaaatcacccgtacctcaacccagtcagtcgtggtcggcgggtggatcaccatttggactgacatgtcgatctcggccgcaagtttaattcgctacggaactgctactcacacggtgaacaccgatcagcgacgcatcggcttgacgttaacgaacaacggaggtaattcgtacagctttcaagttccgtcggacagcggggttgctcttccgggatactggatgttgttcgttatgaattccgctggtgtaccctccgttgcgtcgacgattaacgttacccagggccaaactggccaccatcaccatcaccattag

SEQ ID NO: 26 - protein, 650 aa, Artificial Sequence
  Engineered variant of Galactose Oxidase from Fusarium graminearum
MASAPIGVAIPRNNWAVTCDSAQSGNECIKAIDGNKDTFWHTQYGVNGDPKPPHTITIDMKTVQNVNGLSVLPRQDGNQNGWIGRHEVYLSSDGVNWGSPVASGSWFADSTTKYSNFETRPARYVRLVAITEANGQPWTSIAEINVFQASSYTAPQPGLGRWGPTIDLPIVPSAAAIEPTSGRVLMWSSYRQDAFEDSPGGITLTSSWDPSTGIVSDVTSTVTGHDMFCPGISMDGNGQIVVSGGNDAKKTSLYDSSSDSWIPGPDMQVARGYNSSATMSDGRVFTIGGSYSGGQVEKNGEVYSPSSKTWTSLPNAKVNPMLTADKRGLYRSDNHAWLFGWKKGSVFQAGPSTAMNWYYTSGSGDVKSAGKRQSDRGVAPDAMCGNAVMYDAVKGKILTFGGSPDYQDSDATTNAHIITLGEPGTSPNTVFASNGLLFARTFHTSVVLPDGSVFITGGQQRGVPLEDSTPVFTPEIYVPEQDTFYKQNPNSIVRAYHSISLLLPDGRVFNGGGGLCGDCETNHFDAQIFTPNYLYDSNGNLATRPKITRTSTQSVVVGGWITIWTDMSISAASLIRYGTATHTVNTDQRRIGLTLTNNGGNSYSFQVPSDSGVALPGYWMLFVMNSAGVPSVASTINVTQGQTGHHHHHH

SEQ ID NO: 27 - DNA, 1953 bp, Artificial Sequence
  Engineered variant of Galactose Oxidase from Fusarium graminearum
atggcatcagcaccgatcggggtagccatcccgcgcaacaactgggccgttacatgcgattccgcccagagtgggaatgaatgcattaaggcaattgacggtaataaagacacgttttggcacactcaatatggtgtaaacggagatcccaaaccgccgcacaccatcacgatcgatatgaaaacagtacaaaacgtgaatggcctttctgtactgccacgtcaggatggcaatcagaatggatggatcggacgtcacgaggtgtatttaagttctgatggggtgaattggggatcgcctgtagcgtctgggtcctggtttgccgattccaccacaaagtactctaattttgagacacgtccggcccgttacgtgcgccttgtcgccattaccgaagccaatgggcaaccgtggacttcaattgccgagattaacgtatttcaggcgtctagttacactgccccgcagccgggcttggggcgctggggcccgacaatcgatcttcccattgtgccatcggccgccgcaatcgagccaacgagcggtcgtgtcttgatgtggagctcttatcgtcaggatgcgtttcgtgactctcctggcggtattacactgacgagctcatgggaccctagcactggaattgtatccgatcgcactagtaccgttaccgggcacgacatgttttgccccggtatctcgatggacgggaacggtcagatcgtggtcagcggtggtaatgatgcaaagaaaacttccttatatgattcgagctcggactcttggattccgggcccggatatgcaggtcgcgcgtgggtataactcaagtgcgactatgagtgatgggcgcgtatttacgattggcggcagttattccggcggtcaagttgagaagaacggggaggtttactccccgagctcgaagacttggacttcgctgccgaatgcaaaagttaaccccatgctgaccgccgataaacggggtctgtaccgtagcgataatcatgcttggctgtttgggtggaaaaagggtagcgtcttccaagcaggtccaagtactgccatgaactggtattatacatctgggtcgggggacgttaagagtgcagggaagcgtcaatcagaccgcggagtagccccagacgccatgtgcggtaatgccgtaatgtacgacgcagtcaaaggcaaaattttgactttcgggggctcgcccgattatcaagactcagatgcgactacaaatgcccatattatcacgctgggcgagcctggcacgagtccgaatacggtatttgcgagtaatgggttactgttcgctcgtacctaccatacctcggtggtccttccggacgggagtgtattcatcacaggaggccagcagcgcgcggttccactggaagatagcacacccgtatttactccagagatctacgttcccgaacaagatactttttacaaacaaaacccgaatagtatcgttcgtgcctatcattccatcagcttgttgctgccggacggacgtgttttcaatggtggcggtggcttatgcggcgattgtgagacgaaccactttgatgcgcaaatctttacgccgaattatctttacgatagcaacgggaacttagccactcgccctaaaatcacccgtacctcaacccagtcagtcgtggtcggcgggtggatcaccatttggactgacatgtcgatctcggccgcaagtttaattcgctacggaactgctactcactcggtgaacaccgatcagcgacgcatcggcttgacgttaacgaacaacggaggtaattcgtacagctttcaagttccgtcggacagcggggttgctcttccgggatactggatgttgttcgttatgaattccgctggtgtaccctccgttgcgtcgacgattaacgttacccagggccaaactggccaccatcaccatcaccattag

SEQ ID NO: 28 - protein, 650 aa, Artificial Sequence
  Engineered variant of Galactose Oxidase from Fusarium graminearum
MASAPIGVAIPRNNWAVTCDSAQSGNECIKAIDGNKDTFWHTQYGVNGDPKPPHTITIDMKTVQNVNGLSVLPRQDGNQNGWIGRHEVYLSSDGVNWGSPVASGSWFADSTTKYSNFETRPARYVRLVAITEANGQPWTSIAEINVFQASSYTAPQPGLGRWGPTIDLPIVPSAAAIEPTSGRVLMWSSYRQDAFRDSPGGITLTSSWDPSTGIVSDRTSTVTGHDMFCPGISMDGNGQIVVSGGNDAKKTSLYDSSSDSWIPGPDMQVARGYNSSATMSDGRVFTIGGSYSGGQVEKNGEVYSPSSKTWTSLPNAKVNPMLTADKRGLYRSDNHAWLFGWKKGSVFQAGPSTAMNWYYTSGSGDVKSAGKRQSDRGVAPDAMCGNAVMYDAVKGKILTFGGSPDYQDSDATTNAHIITLGEPGTSPNTVFASNGLLFARTYHTSVVLPDGSVFITGGQQRAVPLEDSTPVFTPEIYVPEQDTFYKQNPNSIVRAYHSISLLLPDGRVFNGGGGLCGDCETNHFDAQIFTPNYLYDSNGNLATRPKITRTSTQSVVVGGWITIWTDMSISAASLIRYGTATHSVNTDQRRIGLTLTNNGGNSYSFQVPSDSGVALPGYWMLFVMNSAGVPSVASTINVTQGQTGHHHHHH

SEQ ID NO: 29 - DNA, 1953 bp, Artificial Sequence
  Engineered variant of Galactose Oxidase from Fusarium graminearum
atggcatcagcaccgatcggggtagccatcccgcgcaacaactgggccgttacatgcgattccgcccagagtgggaatgaatgcattaaggcaattgacggtaataaagacacgttttggcacactcaatatggtgtaacgggagatcccaaaccgccgcacaccatcacgatcgatatgaaaacagtacaaaacgtgaatggcctttctgtactgccacgtcaggatggcaatcagaatggatggatcggacgtcacgaggtgtatttaagttctgatggggtgaattggggatcgcctgtagcgtctgggtcctggtttgccgattccaccacaaagtactctaattttgagacacgtccggcccgttacgtgcgccttgtcgccattaccgaagccaatgggcaaccgtggacttcaattgccgagattaacgtatttcaggcgtctagttacactgccccgcagccgggcttggggcgctggggcccgacaatcgatcttcccattgtgccatcggccgccgcaatcgagccaacgagcggtcgtgtcttgatgtggagctcttatcgtcaggatgcgtttgaggactctcctggcggtattacactgacgagctcatgggaccctagcactggaattgtatccgatcgcactagtaccgttaccgggcacgacatgttttgccccggtatctcgatggacgggaacggtcagatcgtggtcagcggtggtaatgatgcaaagaaaacttccttatatgattcgagctcggactcttggattccgggcccggatatgcaggtcgcgcgtgggtataactcaagtgcgactatgagtgatgggcgcgtatttacgattggcggcagttattccggcggtcaagttgagaagaacggggaggtttactccccgagctcgaagacttggacttcgctgccgaatgcaaaagttaaccccatgctgaccgccgataaacggggtctgtaccgtagcgataatcatgcttggctgtttgggtggaaaaagggtagcgtcttccaagcaggtccaagtactgccatgaactggtattatacatctgggtcgggggacgttaagagtgcagggaagcgtcaatcagaccgcggagtagccccagacgccatgtgcggtaatgccgtaatgtacgacgcagtcaaaggcaaaattttgactttcgggggctcgcccgattatcaagattcagatgcgactacaaatgcccatattatcacgctgggcgagcctggcacgagtccgaatacggtatttgcgagtaatgggttactgttcgctcgtacctttcatacctcggtggtccttccggacgggagtgtattcatcacaggaggccagcagcgcggagttccactggaagatagcacacccgtatttactccagagatctacgttcccgaacaagatactttttacaaacaaaacccgaatagtatcgttcgtgcctatcattccatcagcttgttgctgccggacggacgtgttttcaatggtggcggtggcttatgcggcgattgtgagacgaaccactttgatgcgcaaatctttacgccgaattatctttacgatagcaacgggaacttagccactcgccctaaaatcacccgtacctcaacccagtcagtcgtggtcggcgggtggatcaccatttggactgacatgtcgatctcggccgcaagtttaattcgctacggaactgctactcacacggtgaacaccgatcagcgacgcatcggcttgacgttaacgaacaacggaggtaattcgtacagctttcaagttccgtcggacagcggggttgctcttccgggatactggatgttgttcgttatgaattccgctggtgtaccctccgttgcgtcgacgattaacgttacccagggccaaactggccaccatcaccatcaccattag

SEQ ID NO: 30 - protein, 650 aa, Artificial Sequence
  Engineered variant of Galactose Oxidase from Fusarium graminearum
MASAPIGVAIPRNNWAVTCDSAQSGNECIKAIDGNKDTFWHTQYGVTGDPKPPHTITIDMKTVQNVNGLSVLPRQDGNQNGWIGRHEVYLSSDGVNWGSPVASGSWFADSTTKYSNFETRPARYVRLVAITEANGQPWTSIAEINVFQASSYTAPQPGLGRWGPTIDLPIVPSAAAIEPTSGRVLMWSSYRQDAFEDSPGGITLTSSWDPSTGIVSDRTSTVTGHDMFCPGISMDGNGQIVVSGGNDAKKTSLYDSSSDSWIPGPDMQVARGYNSSATMSDGRVFTIGGSYSGGQVEKNGEVYSPSSKTWTSLPNAKVNPMLTADKRGLYRSDNHAWLFGWKKGSVFQAGPSTAMNWYYTSGSGDVKSAGKRQSDRGVAPDAMCGNAVMYDAVKGKILTFGGSPDYQDSDATTNAHIITLGEPGTSPNTVFASNGLLFARTFHTSVVLPDGSVFITGGQQRGVPLEDSTPVFTPEIYVPEQDTFYKQNPNSIVRAYHSISLLLPDGRVFNGGGGLCGDCETNHFDAQIFTPNYLYDSNGNLATRPKITRTSTQSVVVGGWITIWTDMSISAASLIRYGTATHTVNTDQRRIGLTLTNNGGNSYSFQVPSDSGVALPGYWMLFVMNSAGVPSVASTINVTQGQTGHHHHHH

SEQ ID NO: 31 - DNA, 1953 bp, Artificial Sequence
  Engineered variant of Galactose Oxidase from Fusarium graminearum
atggcatcagcaccgatcggggtagccatcccgcgcaacaactgggccgttacatttgattccgcccagagtgggaatgaatgcattaaggcaattgacggtaataaagacacgttttggcacactcaatatggtgtaaacggagatcccaaaccgccgcacaccatcacgatcgatatgaaaacagtacaaaacgtgaatggcctttctgtactgccacgtcaggatggcaatcagaatggatggatcggacgtcacgaggtgtatttaagttctgatggggtgaattggggatcgcctgtagcgtctgggtcctggtttgccgattccaccacaaagtactctaattttgagacacgtccggcccgttacgtgcgccttgtcgccattaccgaagccaatgggcaaccgtggacttcaattgccgagattaacgtatttcaggcgtctagttacactgccccgcagccgggcttggggcgctggggcccgacaatcgatcttcccattgtgccatcggccgccgcaatcgagccaacgagcggtcgtgtcttgatgtggagctcttatcgtcaggatgcgtttgaggactctcctggcggtattacactgacgagctcatgggaccctagcactggaattgtatccgatcgcactagtaccgttaccgggcacgacatgttttgccccggtatctcgatggacgggaacggtcagatcgtggtcagcggtggtaatgatgcaaagaaaacttccttatatgattcgagctcggactcttggattccgggcccggatatgcaggtcgcgcgtgggtataactcaagtgcgactatgagtgatgggcgcgtatttacgattggcggcagttattccggcggtcaagttgagaagaacggggaggtttactccccgagctcgaagacttggacttcgctgccgaatgcaaaagttaaccccatgctgaccgccgataaacggggtctgtaccgtagcgataatcatgcttggctgtttgggtggaaaaagggtagcgtcttccaagcaggtccaagtactgccatgaactggtattatacatctgggtcgggggacgttaagagtgcagggaagcgtcaatcagaccgcggagtagccccagacgccatgtgcggtaatgccgtaatgtacgacgcagtcaaaggcaaaattttgactttcgggggctcgcccgattatcaagattcagatgcgactacaaatgcccatattatcacgctgggcgagcctggcacgagtccgaatacggtatttgcgagtaatgggttactgttcgctcgtacctttcatacctcggtggtccttccggacgggagtgtattcatcacaggaggccagcagcgcggagttccactggaagatagcacacccgtatttactccagagatctacgttcccgaacaagatactttttacaaacaaaacccgaatagtatcgttcgtgcctatcattccatcagcttgttgctgccggacggacgtgttttcaatggtggcggtggcttatgcggcgattgtgagacgaaccactttgatgcgcaaatctttacgccgaattatctttacgatagcaacgggaacttagccactcgccctaaaaacacccgtacctcaacccagtcagtcgtggtcggcgggtggatcaccattgggactgacatgtcgatttcggccgcaagtttaattcgctacggaactgctactcacacggtgaacaccgatcagcgacgcatcggcttgacgttaacgaacaacggaggtaattcgtacagctttcaagttccgtcggacagcggggttgctcttccgggatactggatgttgttcgttatgaattccgctggtgtaccctccgttgcgtcgacgattaacgttacccagggccaaactggccaccatcaccatcaccattag

SEQ ID NO: 32 - protein, 650 aa, Artificial Sequence
  Engineered variant of Galactose Oxidase from Fusarium graminearum
MASAPIGVAIPRNNWAVTFDSAQSGNECIKAIDGNKDTFWHTQYGVNGDPKPPHTITIDMKTVQNVNGLSVLPRQDGNQNGWIGRHEVYLSSDGVNWGSPVASGSWFADSTTKYSNFETRPARYVRLVAITEANGQPWTSIAEINVFQASSYTAPQPGLGRWGPTIDLPIVPSAAAIEPTSGRVLMWSSYRQDAFEDSPGGITLTSSWDPSTGIVSDRTSTVTGHDMFCPGISMDGNGQIVVSGGNDAKKTSLYDSSSDSWIPGPDMQVARGYNSSATMSDGRVFTIGGSYSGGQVEKNGEVYSPSSKTWTSLPNAKVNPMLTADKRGLYRSDNHAWLFGWKKGSVFQAGPSTAMNWYYTSGSGDVKSAGKRQSDRGVAPDAMCGNAVMYDAVKGKILTFGGSPDYQDSDATTNAHIITLGEPGTSPNTVFASNGLLFARTFHTSVVLPDGSVFITGGQQRGVPLEDSTPVFTPEIYVPEQDTFYKQNPNSIVRAYHSISLLLPDGRVFNGGGGLCGDCETNHFDAQIFTPNYLYDSNGNLATRPKNTRTSTQSVVVGGWITIGTDMSISAASLIRYGTATHTVNTDQRRIGLTLTNNGGNSYSFQVPSDSGVALPGYWMLFVMNSAGVPSVASTINVTQGQTGHHHHHH

SEQ ID NO: 33 - DNA, 1953 bp, Artificial Sequence
  Engineered variant of Galactose Oxidase from Fusarium graminearum
atggcatcagcaccgatcggggtagccatcccgcgcaacaactgggccgttacatgcgattccgcccagagtgggaatgaatgcattaaggcaattgacggtaataaagacacgttttggcacactcaatatggtgtaaacggagatcccaaaccgccgcacaccatcacgatcgatatgaaaacagtacaaaacgtgaatggcctttctgtactgccacgtcaggatggcaatcagaatggatggatcggacgtcacgaggtgtatttaagttctgatggggtgaattggggatcgcctgtagcgtctgggtcctggtttgccgattccaccacaaagtactctaattttgagacacgtccggcccgttacgtgcgccttgtcgccattaccgaagccaatgggcaaccgtggacttcaattgccgagattaacgtatttcaggcgtctagttacactgccccgcagccgggcttggggcgctggggcccgacaatcgatcttcccattgtgccatcggccgccgcaatcgagccaacgagcggtcgtgtcttgatgtggagctcttatcgtcaggatgcgtttgaggactctcctggcggtattacactgacgagctcatgggaccctagcactggaattgtatccgatcgcactagtaccgttaccgggcacgacatgttttgccccggtatctcgatggacgggaacggtcagatcgtggtcagcggtggtaatgatgcaaagaaaacttccttatatgattcgagctcggactcttggattccgggcccggatatgcaggtcgcgcgtgggtataactcaagtgcgactatgagtgatgggcgcgtatttacgattggcggcagttattccggcggtcaagttgagaagaacggggaggtttactccccgagctcgaagacttggacttcgctgccgaatgcaaaagttaaccccatgctgaccgccgataaacggggtctgtaccgtagcgataatcatgcttggctgtttgggtggaaaaagggtagcgtcttccaagcaggtccaagtactgccatgaactggtattatacatctgggtcgggggacgttaagagtgcagggaagcgtcaatcagaccgcggagtagccccagacgccatgtgcggtaatgccgtaatgtacgacgcagtcaaaggcaaaattttgactttcgggggctcgcccgattatggcgattcagatgcgactacaaatgcccatattatcacgctgggcgagcctggcacgagtccgaatacggtatttgcgagtaatgggttactgttcgctcgtacctttcatacctcggtggtccttccggacgggagtgtattcatcacaggaggccagcagcgcggagttccactggaagatagcacacccgtatttactccagagatctacgttcccgaacaagatactttttacaaacaaaacccgaatagtatcgttcgtgcctatcattccatcagcttgttgctgccggacggacgtgttttcaatggtggcggtggcttatgcggcgattgtgagacgaaccactttgatgcgcaaatctttacgccgaattatctttacgatagcaacgggaacttagccactcgccctaaaatcacccgtacctcaacccagtcagtcgtggtcggcgggtggatcaccatttggactgacatgtcgatctcggccgcaagtttaattcgctacggaactgctactcacacggtgaacaccgatcagcgacgcatcggcttgacgttaacgaacaacggaggtaattcgtacagctttcaagttccgtcggacagcggggttgctcttccgggatactggatgttgttcgttatgaattccgctggtgtaccctccgttgcgtcgacgattaacgttacccagggccaaactggccaccatcaccatcaccattag

SEQ ID NO: 34 - protein, 650 aa, Artificial Sequence
  Engineered variant of Galactose Oxidase from Fusarium graminearum
MASAPIGVAIPRNNWAVTCDSAQSGNECIKAIDGNKDTFWHTQYGVNGDPKPPHTITIDMKTVQNVNGLSVLPRQDGNQNGWIGRHEVYLSSDGVNWGSPVASGSWFADSTTKYSNFETRPARYVRLVAITEANGQPWTSIAEINVFQASSYTAPQPGLGRWGPTIDLPIVPSAAAIEPTSGRVLMWSSYRQDAFEDSPGGITLTSSWDPSTGIVSDRTSTVTGHDMFCPGISMDGNGQIVVSGGNDAKKTSLYDSSSDSWIPGPDMQVARGYNSSATMSDGRVFTIGGSYSGGQVEKNGEVYSPSSKTWTSLPNAKVNPMLTADKRGLYRSDNHAWLFGWKKGSVFQAGPSTAMNWYYTSGSGDVKSAGKRQSDRGVAPDAMCGNAVMYDAVKGKILTFGGSPDYGDSDATTNAHIITLGEPGTSPNTVFASNGLLFARTFHTSVVLPDGSVFITGGQQRGVPLEDSTPVFTPEIYVPEQDTFYKQNPNSIVRAYHSISLLLPDGRVFNGGGGLCGDCETNHFDAQIFTPNYLYDSNGNLATRPKITRTSTQSVVVGGWITIWTDMSISAASLIRYGTATHTVNTDQRRIGLTLTNNGGNSYSFQVPSDSGVALPGYWMLFVMNSAGVPSVASTINVTQGQTGHHHHHH

SEQ ID NO: 35 - DNA, 1953 bp, Artificial Sequence
  Engineered variant of Galactose Oxidase from Fusarium graminearum
atggcatcagcaccgatcggggtagccatcccgcgcaacaactgggccgttacatgcgattccgcccagagtgggaatgaatgcattaaggcaattgacggtaataaagacacgttttggcacactcaatatggtgtaaacggagatcccaaaccgccgcacaccatcacgatcgatatgaaaacagtacaaaacgtgaatggcctttctgtactgccacgtcaggatggcaatcagaatggatggatcggacgtcacgaggtgtatttaagttctgatggggtgaattggggatcgcctgtagcgtctgggtcctggtttgccgattccgagacaaagtactctaattttgagacacgtccggcccgttacgtgcgccttgtcgccattaccgaagccaatgggcaaccgtggacttcaattgccgagattaacgtatttcaggcgtctagttacactgccccgcagccgggcttggggcgctggggcccgacaatcgatcttcccattgtgccatcggccgccgcaatcgagccaacgagcggtcgtgtcttgatgtggagctcttatcgtcaggatgcgtttgaggactctcctggcggtattacactgacgagctcatgggaccctagcactggaattgtatccgatcgcactagtaccgttaccgggcacgacatgttttgccccggtatctcgatggacgggaacggtcagatcgtggtcagcggtggtaatgatgcaaagaaaacttccttatatgattcgagctcggactcttggattccgggcccggatatgcaggtcgcgcgtgggtataactcaagtgcgactatgagtgatgggcgcgtatttacgattggcggcagttattccggcggtcaagttgagaagaacggggaggtttactccccgagctcgaagacttggacttcgctgccgaatgcaaaagttaaccccatgctgaccgccgataaacggggtctgtaccgtagcgataatcatgcttggctgtttgggtggaaaaagggtagcgtcttccaagcaggtccaagtactgccatgaactggtattatacatctgggtcgggggacgttaagagtgcagggaagcgtcaatcagaccgcggagtagccccagacgccatgtgcggtaatgccgtaatgtacgacgcagtcaaaggcaaaattttgactttcgggggctcgcccgattatcaagattcagatgcgactacaaatgcccatattatcacgctgggcgagcctggcacgagtccgaatacggtatttgcgagtaatgggttactgttcgctcgtacctttcatacctcggtggtccttccggacgggagtgtattcatcacaggaggccagcagcgcggagttccactggaagatagcacacccgtatttactccagagatctacgttcccgaacaagatactttttacaaacaaaacccgaatagtatcgttcgtgcctatcattccatcagcttgttgctgccggacggacgtgttttcaatggtggcggtggcttatgcggcgattgtgagacgaaccactttgatgcgcaaatctttacgccgaattatctttacgatagcaacgggaacttagccactcgccctaaaatcacccgtacctcaacccagtcagtcgtggtcggcgggtggatcaccatttggactgacatgtcgatctcggccgcaagtttaattcgctacggaactgctactcacacggtgaacaccgatcagcgacgcatcggcttgacgttaacgaacaacggaggtaattcgtacagctttcaagttccgtcggacagcggggttgctcttccgggatactggatgttgttcgttatgaattccgctggtgtaccctccgttgcgtcgacgattaacgttacccagggccaaactggccaccatcaccatcaccattag

SEQ ID NO: 36 - protein, 650 aa, Artificial Sequence
  Engineered variant of Galactose Oxidase from Fusarium graminearum
MASAPIGVAIPRNNWAVTCDSAQSGNECIKAIDGNKDTFWHTQYGVNGDPKPPHTITIDMKTVQNVNGLSVLPRQDGNQNGWIGRHEVYLSSDGVNWGSPVASGSWFADSETKYSNFETRPARYVRLVAITEANGQPWTSIAEINVFQASSYTAPQPGLGRWGPTIDLPIVPSAAAIEPTSGRVLMWSSYRQDAFEDSPGGITLTSSWDPSTGIVSDRTSTVTGHDMFCPGISMDGNGQIVVSGGNDAKKTSLYDSSSDSWIPGPDMQVARGYNSSATMSDGRVFTIGGSYSGGQVEKNGEVYSPSSKTWTSLPNAKVNPMLTADKRGLYRSDNHAWLFGWKKGSVFQAGPSTAMNWYYTSGSGDVKSAGKRQSDRGVAPDAMCGNAVMYDAVKGKILTFGGSPDYQDSDATTNAHIITLGEPGTSPNTVFASNGLLFARTFHTSVVLPDGSVFITGGQQRGVPLEDSTPVFTPEIYVPEQDTFYKQNPNSIVRAYHSISLLLPDGRVFNGGGGLCGDCETNHFDAQIFTPNYLYDSNGNLATRPKITRTSTQSVVVGGWITIWTDMSISAASLIRYGTATHTVNTDQRRIGLTLTNNGGNSYSFQVPSDSGVALPGYWMLFVMNSAGVPSVASTINVTQGQTGHHHHHH

SEQ ID NO: 37 - DNA, 1953 bp, Artificial Sequence
  Engineered variant of Galactose Oxidase from Fusarium graminearum
atggcatcagcaccgatcggggtagccatcccgcgcaacaactgggccgttacatgcgattccgcccagagtgggaatgaatgcattaaggcaattgacggtaataaagacacgttttggcacactcaatatggtgtaaacggagatcccaaaccgccgcacaccatcacgatcgatatgaaaacagtacaaaacgtgaatggcctttctgtactgccacgtcaggatggcaatcagaatggatggatcggacgtcacgaggtgtatttaagttctgatggggtgaattggggatcgcctgtagcgtctgggtcctggtttgccgattccaccacaaagtactctaattttgagacacgtccggcccgttacgtgcgccttgtcgccattaccgaagccaatgggcaaccgtggacttcaattgccgagattaacgtatttcaggcgtctagttacactgccccgcagccgggcttggggcgctggggcccgacaatcgatcttcccattgtgccatcggccgccgcaatcgagccaacgagcggtcgtgtcttgatgtggagctcttatcgtcaggatgcgtttcgtgactctcctggcggtattacactgacgagctcatgggaccctagcactggaattgtatccgatcgcactagtaccgttaccgggcacgacatgttttgccccggtatctcgatggacgggaacggtcagatcgtggtcagcggtggtaatgatgcaaagaaaacttccttatatgattcgagctcggactcttggattccgggcccggatatgcaggtcgcgcgtgggtataactcaagtgcgactatgagtgatgggcgcgtatttacgattggcggcagttatagtggcggtcaagttgagaagaacggggaggtttactccccgagctcgaagacttggacttcgctgccgaatgcaaaagttaaccccatgctgaccgccgataaacggggtctgtaccgtagcgataatcatgcttggctgtttgggtggaaaaagggtagcgtcttccaagcaggtccaagtactgccatgaactggtattatacatctgggtcgggggacgttaagagtgcagggaagcgtcaatcagaccgcggagtagccccagacgccatgtgcggtaatgccgtaatgtacgacgcagtcaaaggcaaaattttgactttcgggggctcgcccgattatgaggactcagatgcgactacaaatgcccatattatcacgctgggcgagcctggcacgagtccgaatacggtatttgcgagtaatgggttactgttcgctcgtacctttcatacctcggtggtccttccggacgggagtgtattcatcacaggaggccagcagcgcggagttccactggaagatagcacacccgtatttactccagagatctacgttcccgaacaagatactttttacaaacaaaacccgaatagtatcgttcgtgcctatcattcgatcagcttgttgctgccggacggacgtgttttcaatggtggcggtggcttatgcggcgattgtgagacgaaccactttgatgcgcaaatctttacgccgaattatctttacgatagcaacgggaacttagccactcgccctaaaatcacccgtacctcaacccagtcagtcgtggtcggcgggtggatcaccatttggactgacatgtcgatctcggccgcaagtttaattcgctacggaactgctactcacacggtgaacaccgatcagcgacgcatcggcttgacgttaacgaacaacggaggtaattcgtacagctttcaagttccgtcggacagcggggttgctcttccgggatactggatgttgttcgttatgaattccgctggtgtaccctccgttgcgtcgacgattaacgttacccagggccaaactggccaccatcaccatcaccattag

SEQ ID NO: 38 - protein, 650 aa, Artificial Sequence
  Engineered variant of Galactose Oxidase from Fusarium graminearum
MASAPIGVAIPRNNWAVTCDSAQSGNECIKAIDGNKDTFWHTQYGVNGDPKPPHTITIDMKTVQNVNGLSVLPRQDGNQNGWIGRHEVYLSSDGVNWGSPVASGSWFADSTTKYSNFETRPARYVRLVAITEANGQPWTSIAEINVFQASSYTAPQPGLGRWGPTIDLPIVPSAAAIEPTSGRVLMWSSYRQDAFRDSPGGITLTSSWDPSTGIVSDRTSTVTGHDMFCPGISMDGNGQIVVSGGNDAKKTSLYDSSSDSWIPGPDMQVARGYNSSATMSDGRVFTIGGSYSGGQVEKNGEVYSPSSKTWTSLPNAKVNPMLTADKRGLYRSDNHAWLFGWKKGSVFQAGPSTAMNWYYTSGSGDVKSAGKRQSDRGVAPDAMCGNAVMYDAVKGKILTFGGSPDYEDSDATTNAHIITLGEPGTSPNTVFASNGLLFARTFHTSVVLPDGSVFITGGQQRGVPLEDSTPVFTPEIYVPEQDTFYKQNPNSIVRAYHSISLLLPDGRVFNGGGGLCGDCETNHFDAQIFTPNYLYDSNGNLATRPKITRTSTQSVVVGGWITIWTDMSISAASLIRYGTATHTVNTDQRRIGLTLTNNGGNSYSFQVPSDSGVALPGYWMLFVMNSAGVPSVASTINVTQGQTGHHHHHH

SEQ ID NO: 39 - DNA, 1953 bp, Artificial Sequence
  Engineered variant of Galactose Oxidase from Fusarium graminearum
atggcatcagcaccgatcggggtagccatcccgcgcaacaactgggccgttacatgcgattccgcccagagtgggaatgaatgcattaaggcaattgacggtaataaagacacgttttggcacactcaatatggtgtaaacggagatcccaaaccgccgcacaccatcacgatcgatatgaaaacagtacaaaacgtgaatggcctttctgtactgccacgtcaggatggcaatcagaatggatggatcggacgtcacgaggtgtatttaagttctgatggggtgaattggggatcgcctgtagcgtctgggtcctggtttgccgattccaccacaaagtactctaattttgagacacgtccggcccgttacgtgcgccttgtcgccattaccgaagccaatgggcaaccgtggacttcaattgccgagattaacgtatttcaggcgtctagttacactgccccgcagccgggcttggggcgctggggcccgacaatcgatcttcccattgtgccatcggccgccgcaatcgagccaacgagcggtcgtgtcttgatgtggagctcttatcgtcaggatgcgtttcgtgactctcctggcggtattacactgacgagctcatgggaccctagcactggaattgtatccgatcgcactagtaccgttaccgggcacgacatgttttgccccggtatctcgatggacgggaacggtcagatcgtggtcagcggtggtaatgatgcaaagaaaacttccttatatgattcgagctcggactcttggattccgggcccggatatgcaggtcgcgcgtgggtataactcaagtgcgactatgagtgatgggcgcgtatttacgattggcggcagttttagtggcggtcaagttgagaagaacggggaggtttactccccgagctcgaagacttggacttcgctgccgaatgcaaaagttaaccccatgctgaccgccgataaacggggtctgtaccgtagcgataatcatgcttggctgtttgggtggaaaaagggtagcgtcttccaagcaggtccaagtactgccatgaactggtattatacatctgggtcgggggacgttaagagtgcagggaagcgtcaatcagaccgcggagtagccccagacgccatgtgcggtaatgccgtaatgtacgacgcagtcaaaggcaaaattttgactttcgggggctcgcccgattatcaagactcagatgcgactacaaatgcccatattatcacgctgggcgagcctggcacgagtccgaatacggtatttgcgagtaatgggttactgttcgctcgtacctttcatacctcggtggtccttccggacgggagtgtattcatcacaggaggccagcagcgcggagttccactggaagatagcacacccgtatttactccagagatctacgttcccgaacaagatactttttacaaacaaaacccgaatagtatcgttcgtgcctatcattcgatcagcttgttgctgccggacggacgtgttttcaatggtggcggtggcttatgcggcgattgtgagacgaaccactttgatgcgcaaatctttacgccgaattatctttacgatagcaacgggaacttagccactcgccctaaaatcacccgtacctcaacccagtcagtcgtggtcggcgggtggatcaccatttggactgacatgtcgatctcggccgcaagtttaattcgctacggaactgctactcacacggtgaacaccgatcagcgacgcatcggcttgacgttaacgaacaacggaggtaattcgtacagctttcaagttccgtcggacagcggggttgctcttccgggatactggatgttgttcgttatgaattccgctggtgtaccctccgttgcgtcgacgattaacgttacccagggccaaactggccaccatcaccatcaccattag

SEQ ID NO: 40 - protein, 650 aa, Artificial Sequence
  Engineered variant of Galactose Oxidase from Fusarium graminearum
MASAPIGVAIPRNNWAVTCDSAQSGNECIKAIDGNKDTFWHTQYGVNGDPKPPHTITIDMKTVQNVNGLSVLPRQDGNQNGWIGRHEVYLSSDGVNWGSPVASGSWFADSTTKYSNFETRPARYVRLVAITEANGQPWTSIAEINVFQASSYTAPQPGLGRWGPTIDLPIVPSAAAIEPTSGRVLMWSSYRQDAFRDSPGGITLTSSWDPSTGIVSDRTSTVTGHDMFCPGISMDGNGQIVVSGGNDAKKTSLYDSSSDSWIPGPDMQVARGYNSSATMSDGRVFTIGGSFSGGQVEKNGEVYSPSSKTWTSLPNAKVNPMLTADKRGLYRSDNHAWLFGWKKGSVFQAGPSTAMNWYYTSGSGDVKSAGKRQSDRGVAPDAMCGNAVMYDAVKGKILTFGGSPDYQDSDATTNAHIITLGEPGTSPNTVFASNGLLFARTFHTSVVLPDGSVFITGGQQRGVPLEDSTPVFTPEIYVPEQDTFYKQNPNSIVRAYHSISLLLPDGRVFNGGGGLCGDCETNHFDAQIFTPNYLYDSNGNLATRPKITRTSTQSVVVGGWITIWTDMSISAASLIRYGTATHTVNTDQRRIGLTLTNNGGNSYSFQVPSDSGVALPGYWMLFVMNSAGVPSVASTINVTQGQTGHHHHHH

SEQ ID NO: 41 - DNA, 1953 bp, Artificial Sequence
  Engineered variant of Galactose Oxidase from Fusarium graminearum
atggcatcagcaccgatcggggtagccatcccgcgcaacaactgggccgttacatgcgattccgcccagagtgggaatgaatgcattaaggcaattgacggtaataaagacacgttttggcacactcaatatggtgtaaacggagatcccaaaccgccgcacaccatcacgatcgatatgaaaacagtacaaaacgtgaatggcctttctgtactgccacgtcaggatggcaatcagaatggatggatcggacgtcacgaggtgtatttaagttctgatggggtgaattggggatcgcctgtagcgtctgggtcctggtttgccgattccaccacaaagtactctaattttgagacacgtccggcccgttacgtgcgccttgtcgccattaccgaagccaatgggcaaccgtggacttcaattgccgagattaacgtatttcaggcgtctagttacactgccccgcagccgggcttggggcgctggggcccgacaatcgatcttcccattgtgccatcggccgccgcaatcgagccaacgagcggtcgtgtcttgatgtggagctcttatcgtcaggatgcgtttcgtgactctcctggcggtattacactgacgagctcatgggaccctagcactggaattgtatccgatcgcactagtaccgttaccgggcacgacatgttttgccccggtatctcgatggacgggaacggtcagatcgtggtcagcggtggtaatgatgcaaagaaaacttccttatatgattcgagctcggactcttggattccgggcccggatatgcaggtcgcgcgtgggtataactcaagtgcgactatgagtgatgggcgcgtatttacgattggcggcagttatagtggcggtcaagttgagaagaacggggaggtttactccccgagctcgaagacttggacttcgctgccgaatgcaaaagttaaccccatgctgaccgccgataaacggggtctgtaccgtagcgataatcatgcttggctgtttgggtggaaaaagggtagcgtcttccaagcaggtccaagtactgccatgaactggtattatacatctgggtcgggggacgttaagagtgcagggaagcgtcaatcagaccgcggagtagccccagacgccatgtgcggtaatgccgtaatgtacgacgcagtcaaaggcaaaattttgactttcgggggctcgcccgattatcaagactcagatgcgactacaaatgcccatattatcacgctgggcgagcctggcacgagtccgaatacggtatttgcgagtaatgggttaaacttcgctcgtacctttcatacctcggtggtccttccggacgggagtgtattcatcacaggaggccagcagcgcggagttccactggaagatagcacacccgtatttactccagagatctacgttcccgaacaagatactttttacaaacaaaacccgaatagtatcgttcgtgcctatcattcgatcagcttgttgctgccggacggacgtgttttcaatggtggcggtggcttatgcggcgattgtgagacgaaccactttgatgcgcaaatctttacgccgaattatctttacgatagcaacgggaacttagccactcgccctaaaatcacccgtacctcaacccagtcagtcgtggtcggcgggtggatcaccatttggactgacatgtcgatctcggccgcaagtttaattcgctacggaactgctactcacacggtgaacaccgatcagcgacgcatcggcttgacgttaacgaacaacggaggtaattcgtacagctttcaagttccgtcggacagcggggttgctcttccgggatactggatgttgttcgttatgaattccgctggtgtaccctccgttgcgtcgacgattaacgttacccagggccaaactggccaccatcaccatcaccattag

SEQ ID NO: 42 - protein, 650 aa, Artificial Sequence
  Engineered variant of Galactose Oxidase from Fusarium graminearum
MASAPIGVAIPRNNWAVTCDSAQSGNECIKAIDGNKDTFWHTQYGVNGDPKPPHTITIDMKTVQNVNGLSVLPRQDGNQNGWIGRHEVYLSSDGVNWGSPVASGSWFADSTTKYSNFETRPARYVRLVAITEANGQPWTSIAEINVFQASSYTAPQPGLGRWGPTIDLPIVPSAAAIEPTSGRVLMWSSYRQDAFRDSPGGITLTSSWDPSTGIVSDRTSTVTGHDMFCPGISMDGNGQIVVSGGNDAKKTSLYDSSSDSWIPGPDMQVARGYNSSATMSDGRVFTIGGSYSGGQVEKNGEVYSPSSKTWTSLPNAKVNPMLTADKRGLYRSDNHAWLFGWKKGSVFQAGPSTAMNWYYTSGSGDVKSAGKRQSDRGVAPDAMCGNAVMYDAVKGKILTFGGSPDYQDSDATTNAHIITLGEPGTSPNTVFASNGLNFARTFHTSVVLPDGSVFITGGQQRGVPLEDSTPVFTPEIYVPEQDTFYKQNPNSIVRAYHSISLLLPDGRVFNGGGGLCGDCETNHFDAQIFTPNYLYDSNGNLATRPKITRTSTQSVVVGGWITIWTDMSISAASLIRYGTATHTVNTDQRRIGLTLTNNGGNSYSFQVPSDSGVALPGYWMLFVMNSAGVPSVASTINVTQGQTGHHHHHH

SEQ ID NO: 43 - DNA, 1953 bp, Artificial Sequence
  Engineered variant of Galactose Oxidase from Fusarium graminearum
atggcatcagcaccgatcggggtagccatcccgcgcaacaactgggccgttacatgcgattccgcccagagtgggaatgaatgcattaaggcaattgacggtaataaagacacgttttggcacactcaatatggtgtaaacggagatcctaaaccgccgcacaccatcacgatcgatatgaaaacagtacaaaacgtgaatggcctttctgtactgccacgtcaggatggcaatcagaatggatggatcggacgtcacgaggtgtatttaagttctgatggggtgaattggggatcgcctgtagcgtctgggtcctggtttgccgattccaccacaaagtactctaattttgagacacgtccggcccgttacgtgcgccttgtcgccattaccgaagccaatgggcaaccgtggacttcaattgcggagattaacgtatttcaggcgtctagttacactgccccgcagccgggcttggggcgctggggcccgacaatcgatcttcccattgtgccatcggccgccgcaatcgagccaacgagcggtcgtgtcttgatgtggagctcttatcgtcaggatgcgtttcgtgactctcctggcggtattacactgacgagctcatgggaccctagcactggaattgtatccgatcgcactagtaccgttaccgggcacgacatgttttgccccggtatctcgatggacgggaacggtcagatcgtggtcagcggtggtaatgatgcaaagaaaacttccttatatgattcgagctcggactcttggattccgggcccggatatgcaggtcgcgcgtgggtataactcaagtgcgactatgagtgatgggcgcgtatttacgattggcggcagttatagtggcggtcaagttgagaagaacggggaggtttactccccgagctcgaagacttggacttcgctgccgaatgcaaaagttaaccccatgctgaccgccgataaacggggtctgtaccgtagcgataatcatgcttggctgtttgggtggaaaaagggtagcgtcttccaagcaggtccaagtactgccatgaactggtattatacatctgggtcgggggacgttaagagtgcagggaagcgtcaatcagaccgcggagtagccccagacgccatgtgcggtaatgccgtaatgtacgacgcagtcaaaggcaaaattttgactttcgggggctcgcccgattatcaagactcagatgcgactacaaatgcccatattatcacgctgggcgagcctggcacgagtccgaatacggtatttgcgagtaatgggttaaacttcgctcgtacctttcatacctcggtggtccttccggacgggagtgtattcatcacaggaggccagcagcgcggagttccactggaagatagcacacccgtatttactccagagatctacgttcccgaacaagatactttttacgtccaaaacccgaatagtatcgttcgtgcctatcattcgatcagcttgttgctgccggacggacgtgttttcaatggtggcggtggcttatgcggcgattgtgagacgaaccactttgatgcgcaaatctttacgccgaattatctttacgatagcaacgggaacttagccactcgccctaaaatcacccgtacctcaacccagtcagtcgtggtcggcgggtggatcaccatttggactgacatgtcgatctcggccgcaagtttaattcgctacggaactgctactcacacggtgaacaccgatcagcgacgcatcggcttgacgttaacgaacaacggaggtaattcgtacagctttcaagttccgtcggacagcggggttgctcttccgggatactggatgttgttcgttatgaattccgctggtgtaccctccgttgcgtcgacgattaacgttacccagggccaaactggccaccatcaccatcaccattag

SEQ ID NO: 44 - protein, 650 aa, Artificial Sequence
  Engineered variant of Galactose Oxidase from Fusarium graminearum
MASAPIGVAIPRNNWAVTCDSAQSGNECIKAIDGNKDTFWHTQYGVNGDPKPPHTITIDMKTVQNVNGLSVLPRQDGNQNGWIGRHEVYLSSDGVNWGSPVASGSWFADSTTKYSNFETRPARYVRLVAITEANGQPWTSIAEINVFQASSYTAPQPGLGRWGPTIDLPIVPSAAAIEPTSGRVLMWSSYRQDAFRDSPGGITLTSSWDPSTGIVSDRTSTVTGHDMFCPGISMDGNGQIVVSGGNDAKKTSLYDSSSDSWIPGPDMQVARGYNSSATMSDGRVFTIGGSYSGGQVEKNGEVYSPSSKTWTSLPNAKVNPMLTADKRGLYRSDNHAWLFGWKKGSVFQAGPSTAMNWYYTSGSGDVKSAGKRQSDRGVAPDAMCGNAVMYDAVKGKILTFGGSPDYQDSDATTNAHIITLGEPGTSPNTVFASNGLNFARTFHTSVVLPDGSVFITGGQQRGVPLEDSTPVFTPEIYVPEQDTFYVQNPNSIVRAYHSISLLLPDGRVFNGGGGLCGDCETNHFDAQIFTPNYLYDSNGNLATRPKITRTSTQSVVVGGWITIWTDMSISAASLIRYGTATHTVNTDQRRIGLTLTNNGGNSYSFQVPSDSGVALPGYWMLFVMNSAGVPSVASTINVTQGQTGHHHHHH

SEQ ID NO: 45 - DNA, 1953 bp, Artificial Sequence
  Engineered variant of Galactose Oxidase from Fusarium graminearum
atggcatcagcaccgatcggggtagccatcccgcgcaacaactgggccgttacatgcgattccgcccagagtgggaatgaatgcattaaggcaattgacggtaataaagacacgttttggcacactcaatatggtgtaaacggagatcccaaaccgccgcacaccatcacgatcgatatgaaaacagtacaaaacgtgaatggcctttctgtactgccacgtcaggatggcaatcagaatggatggatcggacgtcacgaggtgtatttaagttctgatggggtgaattggggatcgcctgtagcgtctgggtcctggtttgccgattccaccacaaagtactctaattttgagacacgtccggcccgttacgtgcgccttgtcgccattaccgaagccaatgggcaaccgtggacttcaattgccgagattaacgtatttcaggcgtctagttacactgccccgcagccgggcttggggcgctggggcccgacaatcgatcttcccattgtgccatcggccgccgcaatcgagccaacgagcggtcgtgtcttgatgtggagctcttatcgtcaggatgcgtttcgtgactctcctggcggtattacactgacgagctcatgggaccctagcactggaattgtatccgatcgcactagtaccgttaccgggcacgacatgttttgccccggtatctcgatggacgggaacggtcagatcgtggtcagcggtggtaatgatgcaaagaaaacttccttatatgattcgagctcggactcttggattccgggcccggatatgcaggtcgcgcgtgggtataactcaagtgcgactatgagtgatgggcgcgtatttacgattggcggcagttatagtggcggtcaagttgagaagaacggggaggtttactccccgagctcgaagacttggacttcgctgccgaatgcaaaagttaaccccatgctgaccgccgataaacggggtctgtaccgtagcgataatcatgcttggctgtttgggtggaaaaagggtagcgtcttccaagcaggtccaagtactgccatgaactggtattatacatctgggtcgggggacgttaagagtgcagggaagcgtcaatcagaccgcggagtagccccagacgccatgtgcggtaatgccgtaatgtacgacgcagtcaaaggcaaaattttgactttcgggggctcgcccgattattctgactcagatgcgactacaaatgcccatattatcacgctgggcgagcctggcacgagtccgaatacggtatttgcgagtaatgggttactgttcgctcgtacctttcatacctcggtggtccttccggacgggagtgtattcatcacaggaggccagcagcgcggagttccactggaagatagcacacccgtatttactccagagatctacgttcccgaacaagatactttttacaaacaaaacccgaatagtatcgttcgtgcctatcattcgatcagcttgttgctgccggacggacgtgttttcaatggtggcggtggcttatgcggcgattgtgagacgaaccactttgatgcgcaaatctttacgccgaattatctttacgatagcaacgggaacttagccactcgccctaaaatcacccgtacctcaacccagtcagtcgtggtcggcgggtggatcaccatttggactgacatgtcgatctcggccgcaagtttaattcgctacggaactgctactcacacggtgaacaccgatcagcgacgcatcggcttgacgttaacgaacaacggaggtaattcgtacagctttcaagttccgtcggacagcggggttgctcttccgggatactggatgttgttcgttatgaattccgctggtgtaccctccgttgcgtcgacgattaacgttacccagggccaaactggccaccatcaccatcaccattag

SEQ ID NO: 46 - protein, 650 aa, Artificial Sequence
  Engineered variant of Galactose Oxidase from Fusarium graminearum
MASAPIGVAIPRNNWAVTCDSAQSGNECIKAIDGNKDTFWHTQYGVNGDPKPPHTITIDMKTVQNVNGLSVLPRQDGNQNGWIGRHEVYLSSDGVNWGSPVASGSWFADSTTKYSNFETRPARYVRLVAITEANGQPWTSIAEINVFQASSYTAPQPGLGRWGPTIDLPIVPSAAAIEPTSGRVLMWSSYRQDAFRDSPGGITLTSSWDPSTGIVSDRTSTVTGHDMFCPGISMDGNGQIVVSGGNDAKKTSLYDSSSDSWIPGPDMQVARGYNSSATMSDGRVFTIGGSYSGGQVEKNGEVYSPSSKTWTSLPNAKVNPMLTADKRGLYRSDNHAWLFGWKKGSVFQAGPSTAMNWYYTSGSGDVKSAGKRQSDRGVAPDAMCGNAVMYDAVKGKILTFGGSPDYSDSDATTNAHIITLGEPGTSPNTVFASNGLLFARTFHTSVVLPDGSVFITGGQQRGVPLEDSTPVFTPEIYVPEQDTFYKQNPNSIVRAYHSISLLLPDGRVFNGGGGLCGDCETNHFDAQIFTPNYLYDSNGNLATRPKITRTSTQSVVVGGWITIWTDMSISAASLIRYGTATHTVNTDQRRIGLTLTNNGGNSYSFQVPSDSGVALPGYWMLFVMNSAGVPSVASTINVTQGQTGHHHHHH

SEQ ID NO: 47 - DNA, 1953 bp, Artificial Sequence
  Engineered variant of Galactose Oxidase from Fusarium graminearum
atggcatcagcaccgatcggggtagccatcccgcgcaacaactgggccgttacatgcgattccgcccagagtgggaatgaatgcattaaggcaattgacggtaataaagacacgttttggcacactcaatatggtgtaaacggagatcccaaaccgccgcacaccatcacgatcgatatgaaaacagtacaaaacgtgaatggcctttctgtactgccacgtcaggatggcaatcagaatggatggatcggacgtcacgaggtgtatttaagttctgatggggtgaattggggatcgcctgtagcgtctgggtcctggtttgccgattccaccacaaagtactctaattttgagacacgtccggcccgttacgtgcgccttgtcgccattaccgaagccaatgggcaaccgtggacttcaattgccgagattaacgtatttcaggcgtctagttacactgccccgcagccgggcttggggcgctggggcccgacaatcgatcttcccattgtgccatcggccgccgcaatcgagccaacgagcggtcgtgtcttgatgtggagctcttatcgtcaggatgcgtttcgtgactctcctggcggtattacactgacgagctcatgggaccctagcactggaattgtatccgatcgcactagtaccgttaccgggcacgacatgttttgccccggtatctcgatggacgggaacggtcagatcgtggtcagcggtggtaatgatgcaaagaaaacttccttatatgattcgagctcggactcttggattccgggcccggatatgcaggtcgcgcgtgggtataactcaagtgcgactatgagtgatgggcgcgtatttacgattggcggcagttttagtggcggtcaagttgagaagaacggggaggtttactccccgagctcgaagacttggacttcgctgccgaatgcaaaagttaaccccatgctgaccgccgataaacggggtctgtaccgtagcgataatcatgcttggctgtttgggtggaaaaagggtagcgtcttccaagcaggtccaagtactgccatgaactggtattatacatctgggtcgggggacgttaagagtgcagggaagcgtcaatcagaccgcggagtagccccagacgccatgtgcggtaatgccgtaatgtacgacgcagtcaaaggcaaaattttgactttcgggggctcgcccgattatgaggattcagatgcgactacaaatgcccatattatcacgctgggcgagcctggcacgagtccgaatacggtatttgcgagtaatgggttaaatttcgctcgtacctttcatacctcggtggtccttccggacgggagtgtattcatcacaggaggccagcagcgcgcggttccactggaagatagcacacccgtatttactccagagatctacgttcccgaacaagatactttttacaagcaaaacccgaatagtatcgttcgtgcctatcattcgatcagcttgttgctgccggacggacgtgttttcaatggtggcggtggcttatgcggcgattgtgagacgaaccactttgatgcgcaaatctttacgccgaattatctttacgatagcaacgggaacttagccactcgccctaaaatcacccgtacctcaacccagtcagtcgtggtcggcgggtggatcaccatttggactgacatgtcgatctcggccgcaagtttaattcgctacggaactgctactcacacggtgaacaccgatcagcgacgcatcggcttgacgttaacgaacaacggaggtaattcgtacagctttcaagttccgtcggacagcggggttgctcttccgggatactggatgttgttcgttatgaattccgctggtgtaccctccgttgcgtcgacgattaacgttacccagggccaaactggccaccatcaccatcaccattag

SEQ ID NO: 48 - protein, 650 aa, Artificial Sequence
  Engineered variant of Galactose Oxidase from Fusarium graminearum
MASAPIGVAIPRNNWAVTCDSAQSGNECIKAIDGNKDTFWHTQYGVNGDPKPPHTITIDMKTVQNVNGLSVLPRQDGNQNGWIGRHEVYLSSDGVNWGSPVASGSWFADSTTKYSNFETRPARYVRLVAITEANGQPWTSIAEINVFQASSYTAPQPGLGRWGPTIDLPIVPSAAAIEPTSGRVLMWSSYRQDAFRDSPGGITLTSSWDPSTGIVSDRTSTVTGHDMFCPGISMDGNGQIVVSGGNDAKKTSLYDSSSDSWIPGPDMQVARGYNSSATMSDGRVFTIGGSFSGGQVEKNGEVYSPSSKTWTSLPNAKVNPMLTADKRGLYRSDNHAWLFGWKKGSVFQAGPSTAMNWYYTSGSGDVKSAGKRQSDRGVAPDAMCGNAVMYDAVKGKILTFGGSPDYEDSDATTNAHIITLGEPGTSPNTVFASNGLNFARTFHTSVVLPDGSVFITGGQQRAVPLEDSTPVFTPEIYVPEQDTFYKQNPNSIVRAYHSISLLLPDGRVFNGGGGLCGDCETNHFDAQIFTPNYLYDSNGNLATRPKITRTSTQSVVVGGWITIWTDMSISAASLIRYGTATHTVNTDQRRIGLTLTNNGGNSYSFQVPSDSGVALPGYWMLFVMNSAGVPSVASTINVTQGQTGHHHHHH

SEQ ID NO: 49 - DNA, 1953 bp, Artificial Sequence
  Engineered variant of Galactose Oxidase from Fusarium graminearum
atggcatcagcaccgatcggggtagccatcccgcgcaacaactgggccgttacatgcgattccgcccagagtgggaatgaatgcattaaggcaattgacggtaataaagacacgttttggcacactcaatatggtgtaaacggagatcccaaaccgccgcacaccatcacgatcgatatgaaaacagtacaaaacgtgaatggcctttctgtactgccacgtcaggatggcaatcagaatggatggatcggacgtcacgaggtgtatttaagttctgatggggtgaattggggatcgcctgtagcgtctgggtcctggtttgccgattccaccacaaagtactctaattttgagacacgtccggcccgttacgtgcgccttgtcgccattaccgaagccaatgggcaaccgtggacttcaattgccgagattaacgtatttcaggcgtctagttacactgccccgcagccgggcttggggcgctggggcccgacaatcgatcttcccattgtgccatcggccgccgcaatcgagccaacgagcggtcgtgtcttgatgtggagctcttatcgtcaggatgcgtttcgtgactctcctggcggtattacactgacgagctcatgggaccctagcactggaattgtatccgatcgcactagtaccgttaccgggcacgacatgttttgccccggtatctcgatggacgggaacggtcagatcgtggtcagcggtggtaatgatgcaaagaaaacttccttatatgattcgagctcggactcttggattccgggcccggatatgcaggtcgcgcgtgggtataactcaagtgcgactatgagtgatgggcgcgtatttacgattggcggcagttttagtggcggtcaagttgagaagaacggggaggtttactccccgagctcgaagacttggacttcgctgccgaatgcaaaagttaaccccatgctgaccgccgataaacggggtctgtaccgtagcgataatcatgcttggctgtttgggtggaaaaagggtagcgtcttccaagcaggtccaagtactgccatgaactggtattatacatctgggtcgggggacgttaagagtgcagggaagcgtcaatcagaccgcggagtagccccagacgccatgtgcggtaatgccgtaatgtacgacgcagtcaaaggcaaaattttgactttcgggggctcgcccgattatgaggactcagatgcgactacaaatgcccatattatcacgctgggcgagcctggcacgagtccgaatacggtatttgcgagtaatgggttactgttcgctcgtacctttcatacctcggtggtccttccggacgggagtgtattcatcacaggaggccagcagcgcgcggttccactggaagatagcacacccgtatttactccagagatctacgttcccgaacaagatactttttacaagcaaaacccgaatagtatcgttcgtgcctatcattcgatcagcttgttgctgccggacggacgtgttttcaatggtggcggtggcttatgcggcgattgtgagacgaaccactttgatgcgcaaatctttacgccgaattatctttacgatagcaacgggaacttagccactcgccctaaaatcacccgtacctcaacccagtcagtcgtggtcggcgggtggatcaccatttggactgacatgtcgatctcggccgcaagtttaattcgctacggaactgctactcacacggtgaacaccgatcagcgacgcatcggcttgacgttaacgaacaacggaggtaattcgtacagctttcaagttccgtcggacagcggggttgctcttccgggatactggatgttgttcgttatgaattccgctggtgtaccctccgttgcgtcgacgattaacgttacccagggccaaactggccaccatcaccatcaccattag

SEQ ID NO: 50 - protein, 650 aa, Artificial Sequence
  Engineered variant of Galactose Oxidase from Fusarium graminearum
MASAPIGVAIPRNNWAVTCDSAQSGNECIKAIDGNKDTFWHTQYGVNGDPKPPHTITIDMKTVQNVNGLSVLPRQDGNQNGWIGRHEVYLSSDGVNWGSPVASGSWFADSTTKYSNFETRPARYVRLVAITEANGQPWTSIAEINVFQASSYTAPQPGLGRWGPTIDLPIVPSAAAIEPTSGRVLMWSSYRQDAFRDSPGGITLTSSWDPSTGIVSDRTSTVTGHDMFCPGISMDGNGQIVVSGGNDAKKTSLYDSSSDSWIPGPDMQVARGYNSSATMSDGRVFTIGGSFSGGQVEKNGEVYSPSSKTWTSLPNAKVNPMLTADKRGLYRSDNHAWLFGWKKGSVFQAGPSTAMNWYYTSGSGDVKSAGKRQSDRGVAPDAMCGNAVMYDAVKGKILTFGGSPDYEDSDATTNAHIITLGEPGTSPNTVFASNGLLFARTFHTSVVLPDGSVFITGGQQRAVPLEDSTPVFTPEIYVPEQDTFYKQNPNSIVRAYHSISLLLPDGRVFNGGGGLCGDCETNHFDAQIFTPNYLYDSNGNLATRPKITRTSTQSVVVGGWITIWTDMSISAASLIRYGTATHTVNTDQRRIGLTLTNNGGNSYSFQVPSDSGVALPGYWMLFVMNSAGVPSVASTINVTQGQTGHHHHHH

SEQ ID NO: 51 - DNA, 1953 bp, Artificial Sequence
  Engineered variant of Galactose Oxidase from Fusarium graminearum
atggcatcagcaccgatcggggtagccatcccgcgcaacaactgggccgttacatgcgattccgcccagagtgggaatgaatgcattaaggcaattgacggtaataaagacacgttttggcacactcaatatggtgtaaacggagatcccaaaccgccgcacaccatcacgatcgatatgaaaacagtacaaaacgtgaatggcctttctgtactgccacgtcaggatggcaatcagaatggatggatcggacgtcacgaggtgtatttaagttctgatggggtgaattggggatcgcctgtagcgtctgggtcctggtttgccgattccaccacaaagtactctaattttgagacacgtccggcccgttacgtgcgccttgtcgccattaccgaagccaatgggcaaccgtggacttcaattgccgagattaacgtatttcaggcgtctagttacactgccccgcagccgggcttggggcgctggggcccgacaatcgatcttcccattgtgccatcggccgccgcaatcgagccaacgagcggtcgtgtcttgatgtggagctcttatcgtcaggatgcgtttcgtgactctcctggcggtattacactgacgagctcatgggaccctagcactggaattgtatccgatcgcactagtaccgttaccgggcacgacatgttttgccccggtatctcgatggacgggaacggtcagatcgtggtcagcggtggtaatgatgcaaagaaaacttccttatatgattcgagctcggactcttggattccgggcccggatatgcaggtcgcgcgtgggtataactcaagtgcgactatgagtgatgggcgcgtatttacgattggcggcagttatagtggcggtcaagttgagaagaacggggaggtttactccccgagctcgaagacttggacttcgctgccgaatgcaaaagttaaccccatgctgaccgccgataaacggggtctgtaccgtagcgataatcatgcttggctgtttgggtggaaaaagggtagcgtcttccaagcaggtccaagtactgccatgaactggtattatacatctgggtcgggggacgttaagagtgcagggaagcgtcaatcagaccgcggagtagccccagacgccatgtgcggtaatgccgtaatgtacgacgcagtcaaaggcaaaattttgactttcgggggctcgcccgattatgaggactcagatgcgactacaaatgcccatattatcacgctgggcgagcctggcacgagtccgaatacggtatttgcgagtaatgggttaaatttcgctcgtacctttcatacctcggtggtccttccggacgggagtgtattcatcacaggaggccagcagcgcgcggttccactggaagatagcacacccgtatttactccagagatctacgttcccgaacaagatactttttacaagcaaaacccgaatagtatcgttcgtgcctatcattcgatcagcttgttgctgccggacggacgtgttttcaatggtggcggtggcttatgcggcgattgtgagacgaaccactttgatgcgcaaatctttacgccgaattatctttacgatagcaacgggaacttagccactcgccctaaaatcacccgtacctcaacccagtcagtcgtggtcggcgggtggatcaccatttggactgacatgtcgatctcggccgcaagtttaattcgctacggaactgctactcacacggtgaacaccgatcagcgacgcatcggcttgacgttaacgaacaacggaggtaattcgtacagctttcaagttccgtcggacagcggggttgctcttccgggatactggatgttgttcgttatgaattccgctggtgtaccctccgttgcgtcgacgattaacgttacccagggccaaactggccaccatcaccatcaccattag

SEQ ID NO: 52 - protein, 650 aa, Artificial Sequence
  Engineered variant of Galactose Oxidase from Fusarium graminearum
MASAPIGVAIPRNNWAVTCDSAQSGNECIKAIDGNKDTFWHTQYGVNGDPKPPHTITIDMKTVQNVNGLSVLPRQDGNQNGWIGRHEVYLSSDGVNWGSPVASGSWFADSTTKYSNFETRPARYVRLVAITEANGQPWTSIAEINVFQASSYTAPQPGLGRWGPTIDLPIVPSAAAIEPTSGRVLMWSSYRQDAFRDSPGGITLTSSWDPSTGIVSDRTSTVTGHDMFCPGISMDGNGQIVVSGGNDAKKTSLYDSSSDSWIPGPDMQVARGYNSSATMSDGRVFTIGGSYSGGQVEKNGEVYSPSSKTWTSLPNAKVNPMLTADKRGLYRSDNHAWLFGWKKGSVFQAGPSTAMNWYYTSGSGDVKSAGKRQSDRGVAPDAMCGNAVMYDAVKGKILTFGGSPDYEDSDATTNAHIITLGEPGTSPNTVFASNGLNFARTFHTSVVLPDGSVFITGGQQRAVPLEDSTPVFTPEIYVPEQDTFYKQNPNSIVRAYHSISLLLPDGRVFNGGGGLCGDCETNHFDAQIFTPNYLYDSNGNLATRPKITRTSTQSVVVGGWITIWTDMSISAASLIRYGTATHTVNTDQRRIGLTLTNNGGNSYSFQVPSDSGVALPGYWMLFVMNSAGVPSVASTINVTQGQTGHHHHHH

SEQ ID NO: 53 - DNA, 1953 bp, Artificial Sequence
  Engineered variant of Galactose Oxidase from Fusarium graminearum
atggcatcagcaccgatcggggtagccatcccgcgcaacaactgggccgttacatgcgattccgcccagagtgggaatgaatgcattaaggcaattgacggtaataaagacacgttttggcacactcaatatggtgtaaacggagatcccaaaccgccgcacaccatcacgatcgatatgaaaacagtacaaaacgtgaatggcctttctgtactgccacgtcaggatggcaatcagaatggatggatcggacgtcacgaggtgtatttaagttctgatggggtgaattggggatcgcctgtagcgtctgggtcctggtttgccgattccaccacaaagtactctaattttgagacacgtccggcccgttacgtgcgccttgtcgccattaccgaagccaatgggcaaccgtggacttcaattgccgagattaacgtatttcaggcgtctagttacactgccccgcagccgggcttggggcgctggggcccgacaatcgatcttcccattgtgccatcggccgccgcaatcgagccaacgagcggtcgtgtcttgatgtggagctcttatcgtcaggatgcgtttcgtgactctcctggcggtattacactgacgagctcatgggaccctagcactggaattgtatccgatcgcactagtaccgttaccgggcacgacatgttttgccccggtatctcgatggacgggaacggtcagatcgtggtcagcggtggtaatgatgcaaagaaaacttccttatatgattcgagctcggactcttggattccgggcccggatatgcaggtcgcgcgtgggtataactcaagtgcgactatgagtgatgggcgcgtatttacgattggcggcagttttagtggcggtcaagttgagaagaacggggaggtttactccccgagctcgaagacttggacttcgctgccgaatgcaaaagttaaccccatgctgaccgccgataaacggggtctgtaccgtagcgataatcatgcttggctgtttgggtggaaaaagggtagcgtcttccaagcaggtccaagtactgccatgaactggtattatacatctgggtcgggggacgttaagagtgcagggaagcgtcaatcagaccgcggagtagccccagacgccatgtgcggtaatgccgtaatgtacgacgcagtcaaaggcaaaattttgactttcgggggctcgcccgattatgaggactcagatgcgactacaaatgcccatattatcacgctgggcgagcctggcacgagtccgaatacggtatttgcgagtaatgggttactgttcgctcgtacctttcatacctcggtggtccttccggacgggagtgtattcatcacaggaggccagcagcgcggggttccactggaagatagcacacccgtatttactccagagatctacgttcccgaacaagatactttttacaagcaaaacccgaatagtatcgttcgtgcctatcattcgatcagcttgttgctgccggacggacgtgttttcaatggtggcggtggcttatgcggcgattgtgagacgaaccactttgatgcgcaaatctttacgccgaattatctttacgatagcaacgggaacttagccactcgccctaaaatcacccgtacctcaacccagtcagtcgtggtcggcgggtggatcaccatttggactgacatgtcgatctcggccgcaagtttaattcgctacggaactgctactcacacggtgaacaccgatcagcgacgcatcggcttgacgttaacgaacaacggaggtaattcgtacagctttcaagttccgtcggacagcggggttgctcttccgggatactggatgttgttcgttatgaattccgctggtgtaccctccgttgcgtcgacgattaacgttacccagggccaaactggccaccatcaccatcaccattag

SEQ ID NO: 54 - protein, 650 aa, Artificial Sequence
  Engineered variant of Galactose Oxidase from Fusarium graminearum
MASAPIGVAIPRNNWAVTCDSAQSGNECIKAIDGNKDTFWHTQYGVNGDPKPPHTITIDMKTVQNVNGLSVLPRQDGNQNGWIGRHEVYLSSDGVNWGSPVASGSWFADSTTKYSNFETRPARYVRLVAITEANGQPWTSIAEINVFQASSYTAPQPGLGRWGPTIDLPIVPSAAAIEPTSGRVLMWSSYRQDAFRDSPGGITLTSSWDPSTGIVSDRTSTVTGHDMFCPGISMDGNGQIVVSGGNDAKKTSLYDSSSDSWIPGPDMQVARGYNSSATMSDGRVFTIGGSFSGGQVEKNGEVYSPSSKTWTSLPNAKVNPMLTADKRGLYRSDNHAWLFGWKKGSVFQAGPSTAMNWYYTSGSGDVKSAGKRQSDRGVAPDAMCGNAVMYDAVKGKILTFGGSPDYEDSDATTNAHIITLGEPGTSPNTVFASNGLLFARTFHTSVVLPDGSVFITGGQQRGVPLEDSTPVFTPEIYVPEQDTFYKQNPNSIVRAYHSISLLLPDGRVFNGGGGLCGDCETNHFDAQIFTPNYLYDSNGNLATRPKITRTSTQSVVVGGWITIWTDMSISAASLIRYGTATHTVNTDQRRIGLTLTNNGGNSYSFQVPSDSGVALPGYWMLFVMNSAGVPSVASTINVTQGQTGHHHHHH

SEQ ID NO: 55 - DNA, 1953 bp, Artificial Sequence
  Engineered variant of Galactose Oxidase from Fusarium graminearum
atggcatcagcaccgatcggggtagccatcccgcgcaacaactgggccgttacatgcgattccgcccagagtgggaatgaatgcattaaggcaattgacggtaataaagacacgttttggcacactcaatatggtgtaaacggagatcccaaaccgccgcacaccatcacgatcgatatgaaaacagtacaaaacgtgaatggcctttctgtactgccacgtcaggatggcaatcagaatggatggatcggacgtcacgaggtgtatttaagttctgatggggtgaattggggatcgcctgtagcgtctgggtcctggtttgccgattccaccacaaagtactctaattttgagacacgtccggcccgttacgtgcgccttgtcgccattaccgaagccaatgggcaaccgtggacttcaattgccgagattaacgtatttcaggcgtctagttacactgccccgcagccgggcttggggcgctggggcccgacaatcgatcttcccattgtgccatcggccgccgcaatcgagccaacgagcggtcgtgtcttgatgtggagctcttatcgtcaggatgcgtttcgtgactctcctggcggtattacactgacgagctcatgggaccctagcactggaattgtatccgatcgcactagtaccgttaccgggcacgacatgttttgccccggtatctcgatggacgggaacggtcagatcgtggtcagcggtggtaatgatgcaaagaaaacttccttatatgattcgagctcggactcttggattccgggcccggatatgcaggtcgcgcgtgggtataactcaagtgcgactatgagtgatgggcgcgtatttacgattggcggcagttttagtggcggtcaagttgagaagaacggggaggtttactccccgagctcgaagacttggacttcgctgccgaatgcaaaagttaaccccatgctgaccgccgataaacggggtctgtaccgtagcgataatcatgcttggctgtttgggtggaaaaagggtagcgtcttccaagcaggtccaagtactgccatgaactggtattatacatctgggtcgggggacgttaagagtgcagggaagcgtcaatcagaccgcggagtagccccagacgccatgtgcggtaatgccgtaatgtacgacgcagtcaaaggcaaaattttgactttcgggggctcgcccgattatgagaattcagatgcgactacaaatgcccatattatcacgctgggcgagcctggcacgagtccgaatacggtatttgcgagtaatgggttaaatttcgctcgtacctttcatacctcggtggtccttccggacgggagtgtattcatcacaggaggccagcagcgcggagttccactggaagatagcacacccgtatttactccagagatctacgttcccgaacaagatactttttacaagcaaaacccgaatagtatcgttcgtgcctatcattcgatcagcttgttgctgccggacggacgtgttttcaatggtggcggtggcttatgcggcgattgtgagacgaaccactttgatgcgcaaatctttacgccgaattatctttacgatagcaacgggaacttagccactcgccctaaaatcacccgtacctcaacccagtcagtcgtggtcggcgggtggatcaccatttggactgacatgtcgatctcggccgcaagtttaattcgctacggaactgctactcacacggtgaacaccgatcagcgacgcatcggcttgacgttaacgaacaacggaggtaattcgtacagctttcaagttccgtcggacagcggggttgctcttccgggatactggatgttgttcgttatgaattccgctggtgtaccctccgttgcgtcgacgattaacgttacccagggccaaactggccaccatcaccatcaccattag

SEQ ID NO: 56 - protein, 650 aa, Artificial Sequence
  Engineered variant of Galactose Oxidase from Fusarium graminearum
MASAPIGVAIPRNNWAVTCDSAQSGNECIKAIDGNKDTFWHTQYGVNGDPKPPHTITIDMKTVQNVNGLSVLPRQDGNQNGWIGRHEVYLSSDGVNWGSPVASGSWFADSTTKYSNFETRPARYVRLVAITEANGQPWTSIAEINVFQASSYTAPQPGLGRWGPTIDLPIVPSAAAIEPTSGRVLMWSSYRQDAFRDSPGGITLTSSWDPSTGIVSDRTSTVTGHDMFCPGISMDGNGQIVVSGGNDAKKTSLYDSSSDSWIPGPDMQVARGYNSSATMSDGRVFTIGGSFSGGQVEKNGEVYSPSSKTWTSLPNAKVNPMLTADKRGLYRSDNHAWLFGWKKGSVFQAGPSTAMNWYYTSGSGDVKSAGKRQSDRGVAPDAMCGNAVMYDAVKGKILTFGGSPDYENSDATTNAHIITLGEPGTSPNTVFASNGLNFARTFHTSVVLPDGSVFITGGQQRGVPLEDSTPVFTPEIYVPEQDTFYKQNPNSIVRAYHSISLLLPDGRVFNGGGGLCGDCETNHFDAQIFTPNYLYDSNGNLATRPKITRTSTQSVVVGGWITIWTDMSISAASLIRYGTATHTVNTDQRRIGLTLTNNGGNSYSFQVPSDSGVALPGYWMLFVMNSAGVPSVASTINVTQGQTGHHHHHH

SEQ ID NO: 57 - DNA, 1953 bp, Artificial Sequence
  Engineered variant of Galactose Oxidase from Fusarium graminearum
atggcatcagcaccgatcggggtagccatcccgcgcaacaactgggccgttacatgcgattccgcccagagtgggaatgaatgcattaaggcaattgacggtaataaagacacgttttggcacactcaatatggtgtaaacggagatcccaaaccgccgcacaccatcacgatcgatatgaaaacagtacaaaacgtgaatggcctttctgtactgccacgtcaggatggcaatcagaatggatggatcggacgtcacgaggtgtatttaagttctgatggggtgaattggggatcgcctgtagcgtctgggtcctggtttgccgattccaccacaaagtactctaattttgagacacgtccggcccgttacgtgcgccttgtcgccattaccgaagccaatgggcaaccgtggacttcaattgccgagattaacgtatttcaggcgtctagttacactgccccgcagccgggcttggggcgctggggcccgacaatcgatcttcccattgtgccatcggccgccgcaatcgagccaacgagcggtcgtgtcttgatgtggagctcttatcgtcaggatgcgtttcgtgactctcctggcggtattacactgacgagctcatgggaccctagcactggaattgtatccgatcgcactagtaccgttaccgggcacgacatgttttgccccggtatctcgatggacgggaacggtcagatcgtggtcagcggtggtaatgatgcaaagaaaacttccttatatgattcgagctcggactcttggattccgggcccggatatgcaggtcgcgcgtgggtataactcaagtgcgactatgagtgatgggcgcgtatttacgattggcggcagttatagtggcggtcaagttctgaagaacggggaggtttactccccgagctcgaagacttggacttcgctgccgaatgcaaaagttaaccccatgctgaccgccgataaacggggtctgtaccgtagcgataatcatgcttggctgtttgggtggaaaaagggtagcgtcttccaagcaggtccaagtactgccatgaactggtattatacatctgggtcgggggacgttaagagtgcagggaagcgtcaatcagaccgcggagtagccccagacgccatgtgcggtaatgccgtaatgtacgacgcagtcaaaggcaaaattttgactttcgggggctcgcccgattatgaggactcagatgcgactacaaatgcccatattatcacgctgggcgagcctggcacgagtccgaatacggtatttgcgagtaatgggttactgttcgctcgtacctttcatacctcggtggtccttccggacgggagtgtattcatcacaggaggccagcagcgcgcggttccactggaagatagcacacccgtatttactccagagatctacgttcccgaacaagatactttttacaagcaaaacccgaatagtatcgttcgtgcctatcattcgatcagcttgttgctgccggacggacgtgttttcaatggtggcggtggcttatgcggcgattgtgagacgaaccactttgatgcgcaaatctttacgccgaattatctttacgatagcaacgggaacttagccactcgccctaaaatcacccgtacctcaacccagtcagtcgtggtcggcgggtggatcaccatttggactgacatgtcgatctcggccgcaagtttaattcgctacggaactgctactcacacggtgaacaccgatcagcgacgcatcggcttgacgttaacgaacaacggaggtaattcgtacagctttcaagttccgtcggacagcggggttgctcttccgggatactggatgttgttcgttatgaattccgctggtgtaccctccgttgcgtcgacgattaacgttacccagggccaaactggccaccatcaccatcaccattag

SEQ ID NO: 58 - protein, 650 aa, Artificial Sequence
  Engineered variant of Galactose Oxidase from Fusarium graminearum
MASAPIGVAIPRNNWAVTCDSAQSGNECIKAIDGNKDTFWHTQYGVNGDPKPPHTITIDMKTVQNVNGLSVLPRQDGNQNGWIGRHEVYLSSDGVNWGSPVASGSWFADSTTKYSNFETRPARYVRLVAITEANGQPWTSIAEINVFQASSYTAPQPGLGRWGPTIDLPIVPSAAAIEPTSGRVLMWSSYRQDAFRDSPGGITLTSSWDPSTGIVSDRTSTVTGHDMFCPGISMDGNGQIVVSGGNDAKKTSLYDSSSDSWIPGPDMQVARGYNSSATMSDGRVFTIGGSYSGGQVLKNGEVYSPSSKTWTSLPNAKVNPMLTADKRGLYRSDNHAWLFGWKKGSVFQAGPSTAMNWYYTSGSGDVKSAGKRQSDRGVAPDAMCGNAVMYDAVKGKILTFGGSPDYEDSDATTNAHIITLGEPGTSPNTVFASNGLLFARTFHTSVVLPDGSVFITGGQQRAVPLEDSTPVFTPEIYVPEQDTFYKQNPNSIVRAYHSISLLLPDGRVFNGGGGLCGDCETNHFDAQIFTPNYLYDSNGNLATRPKITRTSTQSVVVGGWITIWTDMSISAASLIRYGTATHTVNTDQRRIGLTLTNNGGNSYSFQVPSDSGVALPGYWMLFVMNSAGVPSVASTINVTQGQTGHHHHHH

SEQ ID NO: 59 - DNA, 1953 bp, Artificial Sequence
  Engineered variant of Galactose Oxidase from Fusarium graminearum
atggcatcagcaccgatcggggtagccatcccgcgcaacaactgggccgttacatgcgattccgcccagagtgggaatgaatgcattaaggcaattgacggtaataaagacacgttttggcacactcaatatggtgtaaacggagatcccaaaccgccgcacaccatcacgatcgatatgaaaacagtacaaaacgtgaatggcctttctgtactgccacgtcaggatggcaatcagaatggatggatcggacgtcacgaggtgtatttaagttctgatggggtgaattggggatcgcctgtagcgtctgggtcctggtttgccgattccaccacaaagtactctaattttgagacacgtccggcccgttacgtgcgccttgtcgccattaccgaagccaatgggcaaccgtggacttcaattgccgagattaacgtatttcaggcgtctagttacactgccccgcagccgggcttggggcgctggggcccgacaatcgatcttcccattgtgccatcggccgccgcaatcgagccaacgagcggtcgtgtcttgatgtggagctcttatcgtcaggatgcgtttcgtgactctcctggcggtattacactgacgagctcatgggaccctagcactggaattgtatccgatcgcactagtaccgttaccgggcacgacatgttttgccccggtatctcgatggacgggaacggtcagatcgtggtcagcggtggtaatgatgcaaagaaaacttccttatatgattcgagctcggactcttggattccgggcccggatatgcaggtcgcgcgtgggtataactcaagtgcgactatgagtgatgggcgcgtatttacgattggcggcagttatagtggcggtcaagttgagaagaacggggaggtttactccccgagctcgaagacttggacttcgctgccgaatgcaaaagttaaccccatgctgaccgccgataaacggggtctgtaccgtagcgataatcatgcttggctgtttgggtggaaaaagggtagcgtcttccaagcaggtccaagtactgccatgaactggtattatacatctgggtcgggggacgttaagagtgcagggaagcgtcaatcagaccgcggagtagccccagacgccatgtgcggtaatgccgtaatgtacgacgcagtcaaaggcaaaattttgactttcgggggctcgcccgattatgaggattcagatgcgactacaaatgcccatattatcacgctgggcgagcctggcacgagtccgaatacggtatttgcgagtaatgggttactgttcgctcgtacctttcatacctcggtggtccttccggacgggagtgtattcatcacaggaggccagcagcgcgcggttccactggaagatagcacacccgtatttactccagagatctacgttcccgaacaagatactttttacaaacaaaacccgaatagtatcgttcgtgcctatcattcgatcagcttgttgctgccggacggacgtgttttcaatggtggcggtggcttatgcggcgattgtgagacgaaccactttgatgcgcaaatctttacgccgaattatctttacgatagcaacgggaacttagccactcgccctaaaatcacccgtacctcaacccagtcagtcgtggtcggcgggtggatcaccatttggactgacatgtcgatctcggccgcaagtttaattcgctacggaactgctactcacacggtgaacaccgatcagcgacgcatcggcttgacgttaacgaacaacggaggtaattcgtacagctttcaagttccgtcggacagcggggttgctcttccgggatactggatgttgttcgttatgaattccgctggtgtaccctccgttgcgtcgacgattaacgttacccagggccaaactggccaccatcaccatcaccattag

SEQ ID NO: 60 - protein, 650 aa, Artificial Sequence
  Engineered variant of Galactose Oxidase from Fusarium graminearum
MASAPIGVAIPRNNWAVTCDSAQSGNECIKAIDGNKDTFWHTQYGVNGDPKPPHTITIDMKTVQNVNGLSVLPRQDGNQNGWIGRHEVYLSSDGVNWGSPVASGSWFADSTTKYSNFETRPARYVRLVAITEANGQPWTSIAEINVFQASSYTAPQPGLGRWGPTIDLPIVPSAAAIEPTSGRVLMWSSYRQDAFRDSPGGITLTSSWDPSTGIVSDRTSTVTGHDMFCPGISMDGNGQIVVSGGNDAKKTSLYDSSSDSWIPGPDMQVARGYNSSATMSDGRVFTIGGSYSGGQVEKNGEVYSPSSKTWTSLPNAKVNPMLTADKRGLYRSDNHAWLFGWKKGSVFQAGPSTAMNWYYTSGSGDVKSAGKRQSDRGVAPDAMCGNAVMYDAVKGKILTFGGSPDYEDSDATTNAHIITLGEPGTSPNTVFASNGLLFARTFHTSVVLPDGSVFITGGQQRAVPLEDSTPVFTPEIYVPEQDTFYKQNPNSIVRAYHSISLLLPDGRVFNGGGGLCGDCETNHFDAQIFTPNYLYDSNGNLATRPKITRTSTQSVVVGGWITIWTDMSISAASLIRYGTATHTVNTDQRRIGLTLTNNGGNSYSFQVPSDSGVALPGYWMLFVMNSAGVPSVASTINVTQGQTGHHHHHH

SEQ ID NO: 61 - DNA, 1953 bp, Artificial Sequence
  Engineered variant of Galactose Oxidase from Fusarium graminearum
atggcatcagcaccgatcggggtagccatcccgcgcaacaactgggccgttacatgcgattccgcccagagtgggaatgaatgcattaaggcaattgacggtaataaagacacgttttggcacactcaatatggtgtaaacggagatcccaaaccgccgcacaccatcacgatcgatatgaaaacagtacaaaacgtgaatggcctttctgtactgccacgtcaggatggcaatcagaatggatggatcggacgtcacgaggtgtatttaagttctgatggggtgaattggggatcgcctgtagcgtctgggtcctggtttgccgattccaccacaaagtactctaattttgagacacgtccggcccgttacgtgcgccttgtcgccattaccgaagccaatgggcaaccgtggacttcaattgccgagattaacgtatttcaggcgtctagttacactgccccgcagccgggcttggggcgctggggcccgacaatcgatcttcccattgtgccatcggccgccgcaatcgagccaacgagcggtcgtgtcttgatgtggagctcttatcgtcaggatgcgtttcgtgactctcctggcggtattacactgacgagctcatgggaccctagcactggaattgtatccgatcgcactagtaccgttaccgggcacgacatgttttgccccggtatctcgatggacgggaacggtcagatcgtggtcagcggtggtaatgatgcaaagaaaacttccttatatgattcgagctcggactcttggattccgggcccggatatgcaggtcgcgcgtgggtataactcaagtgcgactatgagtgatgggcgcgtatttacgattggcggcagttttagtggcggtcaagttgagaagaacggggaggtttactccccgagctcgaagacttggacttcgctgccgaatgcaaaagttaaccccatgctgaccgccgataaacggggtctgtaccgtagcgataatcatgcttggctgtttgggtggaaaaagggtagcgtcttccaagcaggtccaagtactgccatgaactggtattatacatctgggtcgggggacgttaagagtgcagggaagcgtcaatcagaccgcggagtagccccagacgccatgtgcggtaatgccgtaatgtacgacgcagtcaaaggcaaaattttgactttcgggggctcgcccgattatgagaattcagatgcgactacaaatgcccatattatcacgctgggcgagcctggcacgagtccgaatacggtatttgcgagtaatgggttactgttcgctcgtacctttcatacctcggtggtccttccggacgggagtgtattcatcacaggaggccagcagcgcgcggttccactggaagatagcacacccgtatttactccagagatctacgttcccgaacaagatactttttacaaacaaaacccgaatagtatcgttcgtgcctatcattcgatcagcttgttgctgccggacggacgtgttttcaatggtggcggtggcttatgcggcgattgtgagacgaaccactttgatgcgcaaatctttacgccgaattatctttacgatagcaacgggaacttagccactcgccctaaaatcacccgtacctcaacccagtcagtcgtggtcggcgggtggatcaccatttggactgacatgtcgatctcggccgcaagtttaattcgctacggaactgctactcacacggtgaacaccgatcagcgacgcatcggcttgacgttaacgaacaacggaggtaattcgtacagctttcaagttccgtcggacagcggggttgctcttccgggatactggatgttgttcgttatgaattccgctggtgtaccctccgttgcgtcgacgattaacgttacccagggccaaactggccaccatcaccatcaccattag

SEQ ID NO: 62 - protein, 650 aa, Artificial Sequence
  Engineered variant of Galactose Oxidase from Fusarium graminearum
MASAPIGVAIPRNNWAVTCDSAQSGNECIKAIDGNKDTFWHTQYGVNGDPKPPHTITIDMKTVQNVNGLSVLPRQDGNQNGWIGRHEVYLSSDGVNWGSPVASGSWFADSTTKYSNFETRPARYVRLVAITEANGQPWTSIAEINVFQASSYTAPQPGLGRWGPTIDLPIVPSAAAIEPTSGRVLMWSSYRQDAFRDSPGGITLTSSWDPSTGIVSDRTSTVTGHDMFCPGISMDGNGQIVVSGGNDAKKTSLYDSSSDSWIPGPDMQVARGYNSSATMSDGRVFTIGGSFSGGQVEKNGEVYSPSSKTWTSLPNAKVNPMLTADKRGLYRSDNHAWLFGWKKGSVFQAGPSTAMNWYYTSGSGDVKSAGKRQSDRGVAPDAMCGNAVMYDAVKGKILTFGGSPDYENSDATTNAHIITLGEPGTSPNTVFASNGLLFARTFHTSVVLPDGSVFITGGQQRAVPLEDSTPVFTPEIYVPEQDTFYKQNPNSIVRAYHSISLLLPDGRVFNGGGGLCGDCETNHFDAQIFTPNYLYDSNGNLATRPKITRTSTQSVVVGGWITIWTDMSISAASLIRYGTATHTVNTDQRRIGLTLTNNGGNSYSFQVPSDSGVALPGYWMLFVMNSAGVPSVASTINVTQGQTGHHHHHH

SEQ ID NO: 63 - DNA, 1953 bp, Artificial Sequence; identical to SEQ ID NO: 51
  Engineered variant of Galactose Oxidase from Fusarium graminearum

SEQ ID NO: 64 - protein, 650 aa, Artificial Sequence; identical to SEQ ID NO: 52
  Engineered variant of Galactose Oxidase from Fusarium graminearum

SEQ ID NO: 65 - DNA, 1953 bp, Artificial Sequence
  Engineered variant of Galactose Oxidase from Fusarium graminearum
atggcatcagcaccgatcggggtagccatcccgcgcaacaactgggccgttacatgcgattccgcccagagtgggaatgaatgcattaaggcaattgacggtaataaagacacgttttggcacactcaatatggtgtaaacggagatcccaaaccgccgcacacctatacgatcgatatgaaaacagtacaaaacgtgaatggcctttctgtactgccacgtcaggatggcaatcagaatggatggatcggacgtcacgaggtgtatttaagttctgatggggtgaattggggatcgcctgtagcgtctgggtcctggtttgccgattccaccacaaagtactctaattttgagacacgtccggcccgttacgtgcgccttgtcgccattaccgaagccaatgggcaaccgtggacttcaattgccgagattaacgtatttcaggcgtctagttacactgccccgcagccgggcttggggcgctggggcccgacaatcgatcttcccattgtgccatcggccgccgcaatcgagccaacgagcggtcgtgtcttgatgtggagctcttatcgtcaggatgcgtttcgtgactctcctggcggtattacactgacgagctcatgggaccctagcactggaattgtatccgatcgcactagtaccgttaccgggcacgacatgttttgccccggtatctcgatggacgggaacggtcagatcgtggtcagcggtggtaatgatgcaaagaaaacttccttatatgattcgagctcggactcttggattccgggcccggatatgcaggtcgcgcgtgggtatcaatcaagtgcgactatgagtgatgggcgcgtatttacgattggcggcagttttagtggcggtcaggttgagaagaacggggaggtttactccccgagctcgaagacttggacttcgctgccgaatgcaaaagttaaccccatgctgaccgccgataaacggggtctgtaccgtagcgataatcatgcttggctgtttgggtggaaaaagggtagcgtcttccaagcaggtccaagtactgccatgaactggtattatacatctgggtcgggggacgttaagagtgcagggaagcgtcaatcagaccgcggagtagccccagacgccatgtgcggtaatgccgtaatgtacgacgcagtcaaaggcaaaattttgactttcgggggctcgcccgattatgaggactcagatgcgactacaaatgcccatattatcacgctgggcgagcctggcacgagtccgaatacggtatttgcgagtaatgggttactgttcgctcgtacctttcatacctcggtggtccttccggacgggagtgtattcatcacaggaggccagcagcgcggagttccactggaagatagcacacccgtatttactccagagatctacgttcccgaacaagatactttttacaaacaaaacccgaatagtatcgttcgtgcctatcattcgatcagcttgttgctgccggacggacgtgttttcaatggtggcggtggcttatgcggcgattgtgagacgaaccactttgatgcgcaaatctttacgccgaattatctttacgatagcaacgggaacttagccactcgccctaaaatcacccgtacctcaacccagtcagtcgtggtcggcgggtggatcaccatttggactgacatgtcgatctcggccgcaagtttaattcgctacggaactgctactcacacggtgaacaccgatcagcgacgcatcggcttgacgttaacgaacaacggaggtaattcgtacagctttcaagttccgtcggacagcggggttgctcttccgggatactggatgttgttcgttatgaattccgctggtgtaccctccgttgcgtcgacgattaacgttacccagggccaaactggccaccatcaccatcaccattag

SEQ ID NO: 66 - protein, 650 aa, Artificial Sequence
  Engineered variant of Galactose Oxidase from Fusarium graminearum
MASAPIGVAIPRNNWAVTCDSAQSGNECIKAIDGNKDTFWHTQYGVNGDPKPPHTYTIDMKTVQNVNGLSVLPRQDGNQNGWIGRHEVYLSSDGVNWGSPVASGSWFADSTTKYSNFETRPARYVRLVAITEANGQPWTSIAEINVFQASSYTAPQPGLGRWGPTIDLPIVPSAAAIEPTSGRVLMWSSYRQDAFRDSPGGITLTSSWDPSTGIVSDRTSTVTGHDMFCPGISMDGNGQIVVSGGNDAKKTSLYDSSSDSWIPGPDMQVARGYQSSATMSDGRVFTIGGSFSGGQVEKNGEVYSPSSKTWTSLPNAKVNPMLTADKRGLYRSDNHAWLFGWKKGSVFQAGPSTAMNWYYTSGSGDVKSAGKRQSDRGVAPDAMCGNAVMYDAVKGKILTFGGSPDYEDSDATTNAHIITLGEPGTSPNTVFASNGLLFARTFHTSVVLPDGSVFITGGQQRGVPLEDSTPVFTPEIYVPEQDTFYKQNPNSIVRAYHSISLLLPDGRVFNGGGGLCGDCETNHFDAQIFTPNYLYDSNGNLATRPKITRTSTQSVVVGGWITIWTDMSISAASLIRYGTATHTVNTDQRRIGLTLTNNGGNSYSFQVPSDSGVALPGYWMLFVMNSAGVPSVASTINVTQGQTGHHHHHH

SEQ ID NO: 67 - DNA, 1953 bp, Artificial Sequence
  Engineered variant of Galactose Oxidase from Fusarium graminearum
atggcatcagcaccgatcggggtagccatcccgcgcaacaactgggccgttacatgcgattccgcccagagtgggaatgaatgcaataaggcaattgacggtaataaagacacgttttggcacactcagtatggtgtaaacggagatcccaaaccgccgcacacctatacgatcgatatgaaaacagtacaaaacgtgaatggcctttctgtactgccacgtcaggatggcaatcagaatggatggatcggacgtcacgaggtgtatttaagttctgatggggtgaattggggatcgcctgtagcgtctgggtcctggtttgccgattccaccacaaagtactctaattttgagacacgtccggcccgttacgtgcgccttgtcgccattaccgaagccaatgggcaaccgtggacttcaattgccgagattaacgtatttcaggcgtctagttacactgccccgcagccgggcttggggcgctggggcccgacaatcgatcttcccattgtgccatcggccgccgcaatcgagccaacgagcggtcgtgtcttgatgtggagctcttatcgtaacgatgcgtttcgccgctctcctggcggtattacactgacgagctcatgggaccctagcactggaattgtatccgatcgcgttagtaccgttaccaagcacgacatgttttgccccggtatctcgatggacgggaacggtcagatcgtggtcagcggtggtaatgatgcaaagaaaacttccttatatgattcgagcagtgactcttggattccgggcccggatatgcaggtcgcgcgtgggtataactcaagtgcgactatgagtgatgggcgcgtatttacgattggcggcagttttagtggcggtgtgtttgagaagaacggggaggtttactccccgagctcgaagacttggacttcgctgccgaatgcaaaagttaaccccatgctgaccgccgataaacggggtctgtaccgtagcgataatcatgcttggctgtttgggtggaaaaagggtagcgtcttccaagcaggtccaagtactgccatgaactggtattatacatctgggtcgggggacgttaagagtgcagggaagcgtcaatcagaccgcggagtagccccagacgccatgtgcggtaatgccgtaatgtacgacgcagtcaaaggcaaaattttgactttcgggggctcgcccgattatgaggactcagatgcgactacaaatgcccatattatcacgctgggcgagcctggcacgagtccgaatacggtatttgcgagtaatgggttactgttcgctcgtacctttcatacctcggtggtccttccggacgggagtgtattcatcacaggaggccagcagcgcggagttccactggaagatagcacacccgtatttactccagagatctacgttcccgaacaagatactttttacaaacaaaacccgaatagtatcgttcgtgcctatcattcgatcagcttgttgctgccggacggacgtgttttcaatggtggcggtggcttatgcggcgattgtgagacgaaccactttgatgcgcaaatctttacgccgaattatctttacgatagcaacgggaacttagccactcgccctaaaatcacccgtacctcaacccagtcagtcgtggtcggcgggtggatcaccatttggactgacatgtcgatctcggccgcaagtttaattcgctacggaactgctactcacacggtgaacaccgatcagcgacgcatcggcttgacgttaacgaacaacggaggtaattcgtacagctttcaagttccgtcggacagcggggttgctcttccgggatactggatgttgttcgttatgaattccgctggtgtaccctccgttgcgtcgacgattaacgttacccagggccaaactggccaccatcaccatcaccattag

SEQ ID NO: 68 - protein, 650 aa, Artificial Sequence
  Engineered variant of Galactose Oxidase from Fusarium graminearum
MASAPIGVAIPRNNWAVTCDSAQSGNECNKAIDGNKDTFWHTQYGVNGDPKPPHTYTIDMKTVQNVNGLSVLPRQDGNQNGWIGRHEVYLSSDGVNWGSPVASGSWFADSTTKYSNFETRPARYVRLVAITEANGQPWTSIAEINVFQASSYTAPQPGLGRWGPTIDLPIVPSAAAIEPTSGRVLMWSSYRNDAFRRSPGGITLTSSWDPSTGIVSDRVSTVTKHDMFCPGISMDGNGQIVVSGGNDAKKTSLYDSSSDSWIPGPDMQVARGYNSSATMSDGRVFTIGGSFSGGVFEKNGEVYSPSSKTWTSLPNAKVNPMLTADKRGLYRSDNHAWLFGWKKGSVFQAGPSTAMNWYYTSGSGDVKSAGKRQSDRGVAPDAMCGNAVMYDAVKGKILTFGGSPDYEDSDATTNAHIITLGEPGTSPNTVFASNGLLFARTFHTSVVLPDGSVFITGGQQRGVPLEDSTPVFTPEIYVPEQDTFYKQNPNSIVRAYHSISLLLPDGRVFNGGGGLCGDCETNHFDAQIFTPNYLYDSNGNLATRPKITRTSTQSVVVGGWITIWTDMSISAASLIRYGTATHTVNTDQRRIGLTLTNNGGNSYSFQVPSDSGVALPGYWMLFVMNSAGVPSVASTINVTQGQTGHHHHHH

SEQ ID NO: 69 - DNA, 1953 bp, Artificial Sequence
  Engineered variant of Galactose Oxidase from Fusarium graminearum
atggcatcagcaccgatcggggtagccatcccgcgcaacaactgggccgttacatgcgattccgcccagagtgggaatgaatgcattaaggcaattgacggtaataaagacacgttttggcacactcaatatggtgtaaacggagatcccaaaccgccgcacaccatcacgatcgatatgaaaacaacgcaaaacgtgaatggcctttctgtactgccacgtcaggatggcaatcagaatggatggatcggacgtcacgaggtgtatttaagttctgatggggtgaattggggatcgcctgtagcgtctgggtcctggtttgccgattccaccacaaagtactctaattttgagacacgtccggcccgttacgtgcgccttgtcgccattaccgaagccaatgggcaaccgtggacttcaattgccgagattaacgtatttcaggcgtctagttacactgccccgcagccgggcttggggcgctggggcccgacaatcgatcttcccattgtgccatcggccgccgcaatcgagccaacgagcggtcgtgtcttgatgtggagctcttatcgtcaggatgcgtttcgtgactctcctggcggtattacactgacgagctcatgggaccctagcactggaattgtatccgatcgcactagtaccgttaccgggcacgacatgttttgccccggtatctcgatggacgggaacggtcagatcgtggtcagcggtggtaatgatgcaaagaaaacttccttatatgattcgagctcggactcttggattccgggcccggatatgcaggtcgcgcgtgggtataactcaagtgcgactatgagtgatgggcgcgtatttacgattggcggcagttttagtggcggtgtggttgagaagaacggggaggtttactccccgagctcgaagacttggacttcgctgccgaatgcaaaagttaaccccatgctgaccgccgataaacggggtctgtaccgtagcgataatcatgcttggctgtttgggtggaaaaagggtagcgtcttccaagcaggtccaagtactgccatgaactggtattatacatctgggtcgggggacgttaagagtgcagggaagcgtcaatcagaccgcggagtagccccagacgccatgtgcggtaatgccgtaatgtacgacgcagtcaaaggcaaaattttgactttcgggggctcgcccgattatgaggactcagatgcgactacaaatgcccatattatcacgctgggcgagcctggcacgagtccgaatacggtatttgcgagtaatgggttactgttcgctcgtacctttcatacctcggtggtccttccggacgggagtgtattcatcacaggaggccagcagcgcggagttccactggaagatagcacacccgtatttactccagagatctacgttcccgaacaagatactttttacaaacaaaacccgaatagtatcgttcgtgcctatcattcgatcagcttgttgctgccggacggacgtgttttcaatggtggcggtggcttatgcggcgattgtgagacgaaccactttgatgcgcaaatctttacgccgaattatctttacgatagcaacgggaacttagccactcgccctaaaatcacccgtacctcaacccagtcagtcgtggtcggcgggtggatcaccatttggactgacatgtcgatctcggccgcaagtttaattcgctacggaactgctactcacacggtgaacaccgatcagcgacgcatcggcttgacgttaacgaacaacggaggtaattcgtacagctttcaagttccgtcggacagcggggttgctcttccgggatactggatgttgttcgttatgaattccgctggtgtaccctccgttgcgtcgacgattaacgttacccagggccaaactggccaccatcaccatcaccattag

SEQ ID NO: 70 - protein, 650 aa, Artificial Sequence
  Engineered variant of Galactose Oxidase from Fusarium graminearum
MASAPIGVAIPRNNWAVTCDSAQSGNECIKAIDGNKDTFWHTQYGVNGDPKPPHTITIDMKTTQNVNGLSVLPRQDGNQNGWIGRHEVYLSSDGVNWGSPVASGSWFADSTTKYSNFETRPARYVRLVAITEANGQPWTSIAEINVFQASSYTAPQPGLGRWGPTIDLPIVPSAAAIEPTSGRVLMWSSYRQDAFRDSPGGITLTSSWDPSTGIVSDRTSTVTGHDMFCPGISMDGNGQIVVSGGNDAKKTSLYDSSSDSWIPGPDMQVARGYNSSATMSDGRVFTIGGSFSGGVVEKNGEVYSPSSKTWTSLPNAKVNPMLTADKRGLYRSDNHAWLFGWKKGSVFQAGPSTAMNWYYTSGSGDVKSAGKRQSDRGVAPDAMCGNAVMYDAVKGKILTFGGSPDYEDSDATTNAHIITLGEPGTSPNTVFASNGLLFARTFHTSVVLPDGSVFITGGQQRGVPLEDSTPVFTPEIYVPEQDTFYKQNPNSIVRAYHSISLLLPDGRVFNGGGGLCGDCETNHFDAQIFTPNYLYDSNGNLATRPKITRTSTQSVVVGGWITIWTDMSISAASLIRYGTATHTVNTDQRRIGLTLTNNGGNSYSFQVPSDSGVALPGYWMLFVMNSAGVPSVASTINVTQGQTGHHHHHH

SEQ ID NO: 71 - DNA, 1953 bp, Artificial Sequence
  Engineered variant of Galactose Oxidase from Fusarium graminearum
atggcatcagcaccgatcggggtagccatcccgcgcaacaactgggccgttacatgcgattccgcccagagtgggaatgaatgcattaaggcaattgacggtaataaagacacgttttggcacactcagtatggtgtaaacggagatcccaaaccgccgcacacctatacgatcgatatgaaaacagtacaaaacgtgaatggcctttctgtactgccacgtcaggatggcaatcagaatggatggatcggacgtcacgaggtgtatttaagttctgatggggtcaattggggatcgcctgtagcgtctgggtcctggtttgccgattccaccacaaagtactctaattttgagacacgtccggcccgttacgtgcgccttgtcgccattaccgaagccaatgggcaaccgtggacttcaattgccgagattaacgtatttcaggcgtctagttacactgccccgcagccgggcttggggcgctggggcccgacaatcgatcttcccattgtgccatcggccgccgcaatcgagccaacgagcggtcgtgtcttgatgtggagctcttatcgtcaggatgcgtttcgcgactctcctggcggtattacactgacgagctcatgggaccctagcactggaattgtatccgatcgcactagtaccgttaccgggcacgacatgttttgccccggtatctcgatggacgggaacggtcagatcgtggtcagcggtggtaatgatgcaaagaaaacttccttatatgattcgagctcggactcttggattccgggcccggatatgcaggtcgcgcgtgggtatcaatcaagtgcgactatgagtgatgggcgcgtatttacgattggcggcagttatagtggcggtgtggttgagaagaacggggaggtttactccccgagctcgaagacttggacttcgctgccgaatgcaaaagttaaccccatgctgaccgccgataaacggggtctgtaccgtagcgataatcatgcttggctgtttgggtggaaaaagggtagcgtcttccaagcaggtccaagtactgccatgaactggtattatacatctgggtcgggggacgttaagagtgcagggaagcgtcaatcagaccgcggagtagccccagacgccatgtgcggtaatgccgtaatgtacgacgcagtcaaaggcaaaattttgactttcgggggctcgcccgattatgaggactcagatgcgactacaaatgcccatattatcacgctgggcgagcctggcacgagtccgaatacggtatttgcgagtaatgggttactgttcgctcgtacctttcatacctcggtggtccttccggacgggagtgtattcatcacaggaggccagcagcgcggagttccactggaagatagcacacccgtatttactccagagatctacgttcccgaacaagatactttttacaaacaaaacccgaatagtatcgttcgtgcctatcattcgatcagcttgttgctgccggacggacgtgttttcaatggtggcggtggcttatgcggcgattgtgagacgaaccactttgatgcgcaaatctttacgccgaattatctttacgatagcaacgggaacttagccactcgccctaaaatcacccgtacctcaacccagtcagtcgtggtcggcgggtggatcaccatttggactgacatgtcgatctcggccgcaagtttaattcgctacggaactgctactcacacggtgaacaccgatcagcgacgcatcggcttgacgttaacgaacaacggaggtaattcgtacagctttcaagttccgtcggacagcggggttgctcttccgggatactggatgttgttcgttatgaattccgctggtgtaccctccgttgcgtcgacgattaacgttacccagggccaaactggccaccatcaccatcaccattag

SEQ ID NO: 72 - protein, 650 aa, Artificial Sequence
  Engineered variant of Galactose Oxidase from Fusarium graminearum
MASAPIGVAIPRNNWAVTCDSAQSGNECIKAIDGNKDTFWHTQYGVNGDPKPPHTYTIDMKTVQNVNGLSVLPRQDGNQNGWIGRHEVYLSSDGVNWGSPVASGSWFADSTTKYSNFETRPARYVRLVAITEANGQPWTSIAEINVFQASSYTAPQPGLGRWGPTIDLPIVPSAAAIEPTSGRVLMWSSYRQDAFRDSPGGITLTSSWDPSTGIVSDRTSTVTGHDMFCPGISMDGNGQIVVSGGNDAKKTSLYDSSSDSWIPGPDMQVARGYQSSATMSDGRVFTIGGSYSGGVVEKNGEVYSPSSKTWTSLPNAKVNPMLTADKRGLYRSDNHAWLFGWKKGSVFQAGPSTAMNWYYTSGSGDVKSAGKRQSDRGVAPDAMCGNAVMYDAVKGKILTFGGSPDYEDSDATTNAHIITLGEPGTSPNTVFASNGLLFARTFHTSVVLPDGSVFITGGQQRGVPLEDSTPVFTPEIYVPEQDTFYKQNPNSIVRAYHSISLLLPDGRVFNGGGGLCGDCETNHFDAQIFTPNYLYDSNGNLATRPKITRTSTQSVVVGGWITIWTDMSISAASLIRYGTATHTVNTDQRRIGLTLTNNGGNSYSFQVPSDSGVALPGYWMLFVMNSAGVPSVASTINVTQGQTGHHHHHH

SEQ ID NO: 73 - DNA, 1953 bp, Artificial Sequence; identical to SEQ ID NO: 51
  Engineered variant of Galactose Oxidase from Fusarium graminearum

SEQ ID NO: 74 - protein, 650 aa, Artificial Sequence; identical to SEQ ID NO: 52
  Engineered variant of Galactose Oxidase from Fusarium graminearum

SEQ ID NO: 75 - DNA, 1953 bp, Artificial Sequence
  Engineered variant of Galactose Oxidase from Fusarium graminearum
atggcatcagcaccgatcgggagcgccatcccgcgcaacaactgggccgttacatgcgattccgcccagagtgggaatgaatgcattaaggcaattgacggtaataaagacacgttttggcacactcaatatggtgtaaacggagatcccaaaccgccgcacaccatcacgatcgatatgaaaacaacgcaaaacgtgaatggcctttctgtactgccacgtcaggatggcaatcagaatggatggatcggacgtcacgaggtgtatttaagttctgatggggtgaattggggatcgcctgtagcgtctgggtcctggtttgccgattccaccacaaagtactctaattttgagacacgtccggcccgttacgtgcgccttgtcgccattaccgaagccaatgggcaaccgtggacttcaattgccgagattaacgtatttcaggcgtctagttacactgccccgcagccgggcttggggcgctggggcccgacaatcgatcttcccattgtgccatcggccgccgcaatcgagccaacgagcggtcgtgtcttgatgtggagctcttatcgtcaggatgcgtttcgtgactctcctggcggtattacactgacgagctcatgggaccctagcactggaattgtatccgatcgcacgagtaccgttaccaagcacgacatgttttgccccggtatctcgatggacgggaacggtcagatcgtggtcagcggtggtaatgatgcaaagaaaacttccttatatgattcgagcagtgactcttggattccgggcccggatatgcaggtcgcgcgtgggtatcaatcaagtgcgactatgagtgatgggcgcgtatttacgattggcggcagttttagtggcggtgtgtttgagaagaacggggaggtttactccccgagctcgaagacttggacttcgctgccgaatgcaaaagttaaccccatgctgaccgccgataaacggggtctgtaccgtagcgataatcatgcttggctgtttgggtggaaaaagggtagcgtcttccaagcaggtccaagtactgccatgaactggtattatacatctgggtcgggggacgttaagagtgcagggaagcgtcaatcagaccgcggagtagccccagacgccatgtgcggtaatgccgtaatgtacgacgcagtcaaaggcaaaattttgactttcgggggctcgcccgattatgaggactcagatgcgactacaaatgcccatattatcacgctgggcgagcctggcacgagtccgaatacggtatttgcgagtaatgggttactgttcgctcgtacctttcatacctcggtggtccttccggacgggagtgtattcatcacaggaggccagcagcgcggagttccactggaagatagcacacccgtatttactccagagatctacgttcccgaacaagatactttttacaaacaaaacccgaatagtatcgttcgtgcctatcattcgatcagcttgttgctgccggacggacgtgttttcaatggtggcggtggcttatgcggcgattgtgagacgaaccactttgatgcgcaaatctttacgccgaattatctttacgatagcaacgggaacttagccactcgccctaaaatcacccgtacctcaacccagtcagtcgtggtcggcgggtggatcaccatttggactgacatgtcgatctcggccgcaagtttaattcgctacggaactgctactcacacggtgaacaccgatcagcgacgcatcggcttgacgttaacgaacaacggaggtaattcgtacagctttcaagttccgtcggacagcggggttgctcttccgggatactggatgttgttcgttatgaattccgctggtgtaccctccgttgcgtcgacgattaacgttacccagggccaaactggccaccatcaccatcaccattag

SEQ ID NO: 76 - protein, 650 aa, Artificial Sequence
  Engineered variant of Galactose Oxidase from Fusarium graminearum
MASAPIGSAIPRNNWAVTCDSAQSGNECIKAIDGNKDTFWHTQYGVNGDPKPPHTITIDMKTTQNVNGLSVLPRQDGNQNGWIGRHEVYLSSDGVNWGSPVASGSWFADSTTKYSNFETRPARYVRLVAITEANGQPWTSIAEINVFQASSYTAPQPGLGRWGPTIDLPIVPSAAAIEPTSGRVLMWSSYRQDAFRDSPGGITLTSSWDPSTGIVSDRTSTVTKHDMFCPGISMDGNGQIVVSGGNDAKKTSLYDSSSDSWIPGPDMQVARGYQSSATMSDGRVFTIGGSFSGGVFEKNGEVYSPSSKTWTSLPNAKVNPMLTADKRGLYRSDNHAWLFGWKKGSVFQAGPSTAMNWYYTSGSGDVKSAGKRQSDRGVAPDAMCGNAVMYDAVKGKILTFGGSPDYEDSDATTNAHIITLGEPGTSPNTVFASNGLLFARTFHTSVVLPDGSVFITGGQQRGVPLEDSTPVFTPEIYVPEQDTFYKQNPNSIVRAYHSISLLLPDGRVFNGGGGLCGDCETNHFDAQIFTPNYLYDSNGNLATRPKITRTSTQSVVVGGWITIWTDMSISAASLIRYGTATHTVNTDQRRIGLTLTNNGGNSYSFQVPSDSGVALPGYWMLFVMNSAGVPSVASTINVTQGQTGHHHHHH

SEQ ID NO: 77 - DNA, 1953 bp, Artificial Sequence
  Engineered variant of Galactose Oxidase from Fusarium graminearum
atggcatcagcaccgatcggggtagccatcccgcgcaacaactgggccgttacatgcgattccgcccagagtgggaatgaatgcattaaggcaattgacggtaataaagacacgttttggcacactcaatatggtgtaaacggagatcccaaaccgccgcacaccatcacgatcgatatgaaaacaacgcaaaacgtgaatggcctttctgtactgccacgtcaggatggcaatcagaatggatggatcggacgtcacgaggtgtatttaagttctgatggggtgaattggggatcgcctgtagcgtctgggtcctggtttgccgattccaccacaaagtactctaattttgagacacgtccggcccgttacgtgcgccttgtcgccattaccgaagccaatgggcaaccgtggacttcaattgccgagattaacgtatttcaggcgtctagttacactgccccgcagccgggcttggggcgctggggcccgacaatcgatcttcccattgtgccatcggccgccgcaatcgagccaacgagcggtcgtgtcttgatgtggagctcttatcgtaacgatgcgtttcgcgactctcctggcggtattacactgacgagctcatgggaccctagcactggaattgtatccgatcgcacgagtaccgttaccggccacgacatgttttgccccggtatctcgatggacgggaacggtcagatcgtggtcagcggtggtaatgatgcaaagaaaacttccttatatgattcgagcagtgactcttggattccgggcccggatatgcaggtcgcgcgtgggtataactcaagtgcgactatgagtgatgggcgcgtatttacgattggcggcagttatagtggcggtgtggttgagaagaacggggaggtttactccccgagctcgaagacttggacttcgctgccgaatgcaaaagttaaccccatgctgaccgccgataaacggggtctgtaccgtagcgataatcatgcttggctgtttgggtggaaaaagggtagcgtcttccaagcaggtccaagtactgccatgaactggtattatacatctgggtcgggggacgttaagagtgcagggaagcgtcaatcagaccgcggagtagccccagacgccatgtgcggtaatgccgtaatgtacgacgcagtcaaaggcaaaattttgactttcgggggctcgcccgattatgaggactcagatgcgactacaaatgcccatattatcacgctgggcgagcctggcacgagtccgaatacggtatttgcgagtaatgggttactgttcgctcgtacctttcatacctcggtggtccttccggacgggagtgtattcatcacaggaggccagcagcgcggagttccactggaagatagcacacccgtatttactccagagatctacgttcccgaacaagatactttttacaaacaaaacccgaatagtatcgttcgtgcctatcattcgatcagcttgttgctgccggacggacgtgttttcaatggtggcggtggcttatgcggcgattgtgagacgaaccactttgatgcgcaaatctttacgccgaattatctttacgatagcaacgggaacttagccactcgccctaaaatcacccgtacctcaacccagtcagtcgtggtcggcgggtggatcaccatttggactgacatgtcgatctcggccgcaagtttaattcgctacggaactgctactcacacggtgaacaccgatcagcgacgcatcggcttgacgttaacgaacaacggaggtaattcgtacagctttcaagttccgtcggacagcggggttgctcttccgggatactggatgttgttcgttatgaattccgctggtgtaccctccgttgcgtcgacgattaacgttacccagggccaaactggccaccatcaccatcaccattag

SEQ ID NO: 78 - protein, 650 aa, Artificial Sequence
  Engineered variant of Galactose Oxidase from Fusarium graminearum
MASAPIGVAIPRNNWAVTCDSAQSGNECIKAIDGNKDTFWHTQYGVNGDPKPPHTITIDMKTTQNVNGLSVLPRQDGNQNGWIGRHEVYLSSDGVNWGSPVASGSWFADSTTKYSNFETRPARYVRLVAITEANGQPWTSIAEINVFQASSYTAPQPGLGRWGPTIDLPIVPSAAAIEPTSGRVLMWSSYRNDAFRDSPGGITLTSSWDPSTGIVSDRTSTVTGHDMFCPGISMDGNGQIVVSGGNDAKKTSLYDSSSDSWIPGPDMQVARGYNSSATMSDGRVFTIGGSYSGGVVEKNGEVYSPSSKTWTSLPNAKVNPMLTADKRGLYRSDNHAWLFGWKKGSVFQAGPSTAMNWYYTSGSGDVKSAGKRQSDRGVAPDAMCGNAVMYDAVKGKILTFGGSPDYEDSDATTNAHIITLGEPGTSPNTVFASNGLLFARTFHTSVVLPDGSVFITGGQQRGVPLEDSTPVFTPEIYVPEQDTFYKQNPNSIVRAYHSISLLLPDGRVFNGGGGLCGDCETNHFDAQIFTPNYLYDSNGNLATRPKITRTSTQSVVVGGWITIWTDMSISAASLIRYGTATHTVNTDQRRIGLTLTNNGGNSYSFQVPSDSGVALPGYWMLFVMNSAGVPSVASTINVTQGQTGHHHHHH

SEQ ID NO: 79 - DNA, 1953 bp, Artificial Sequence
  Engineered variant of Galactose Oxidase from Fusarium graminearum
atggcatcagcaccgatcggggtagccatcccgcgcaacaactgggccgttacatgcgattccgcccagagtgggaatgaatgcattaaggcaattgacggtaataaagacacgttttggcacactcaatatggtgtaaacggagatcccaaaccgccgcacaccatcacgatcgatatgaaaacagtacaaaacgtgaatggcctttctgtactgccacgtcaggatggcaatcagaatggatggatcggacgtcacgaggtgtatttaagttctgatggggtgaattggggatcgcctgtagcgtctgggtcctggtttgccgattccaccacaaagtactctaattttgagacacgtccggcccgttacgtgcgccttgtcgccattaccgaagccaatgggcaaccgtggacttcaattgccgagattaacgtatttcaggcgtctagttacactgccccgcagccgggcttggggcgctggggcccgacaatcgatcttcccattgtgccatcggccgccgcaatcgagccaacgagcggtcgtgtcttgatgtggagctcttatcgtcaggatgcgtttcgtgactctcctggcggtattacactgacgagctcatgggaccctagcactggaattgtatccgatcgcactgtgaccgttaccgggcacgacatgttttgccccggtatctcgatggacgggaacggtcagatcgtggtcagcggtggtaatgatgcaaagaaaacttccttatatgattcgagctcggactcttggattccgggcccggatatgcaggtcgcgcgtgggtataactcaagtgcgactatgagtgatgggcgcgtatttacgattggcggcagttatagtggcggtcaagttgagaagaacggggaggtttactccccgagctcgaagacttggacttcgctgccgaatgcaaaagttaaccccatgctgaccgccgataaacggggtctgtaccgtagcgataatcatgcttggctgtttgggtggaaaaagggtagcgtcttccaagcaggtccaagtactgccatgaactggtattatacatctgggtcgggggacgttaagagtgcagggaagcgtcaatcagaccgcggagtagccccagacgccatgtgcggtaatgccgtaatgtacgacgcagtcaaaggcaaaattttgactttcgggggctcgcccgattatgaggactcagatgcgactacaaatgcccatattatcacgctgggcgagcctggcacgctgccgaatacggtatttgcgagtaatgggttactgttcgctcgtacctttcatacctcggtggtccttccggacgggagtgtgttcatcacaggaggccagcagcgcggagttccactggaagatagcacacccgtatttactccagagatctacgttcccgaacaagatactttttacaaacaaaacccgaatagtatcgttcgtgcctatcattcgatcagcttgttgctgccggacggacgtgttttcaatggtggcggtggcttatgcggcgattgtgagacgaaccactttgatgcgcaaatctttacgccgaattatctttacgatagcaacgggaacttagccactcgccctaaaatcacccgtacctcaacccagtcagtcgtggtcggcgggtggatcaccatttggactgacagttcgatctcggcagcaagtttaattcgctacggaactgctactcacacggtgaacaccgatcagcgacgcatcggcttgacgttaacgaacaacggaggtaattcgtacagctttcaagttccgtcggacagcggggttgctcttccgggatactggatgttgttcgttatgaattccgctggtgtaccctccgttgcgtcgacgattaacgttacccagggccaaactggccaccatcaccatcaccatagg

SEQ ID NO: 80 - protein, 651 aa, Artificial Sequence
  Engineered variant of Galactose Oxidase from Fusarium graminearum
MASAPIGVAIPRNNWAVTCDSAQSGNECIKAIDGNKDTFWHTQYGVNGDPKPPHTITIDMKTVQNVNGLSVLPRQDGNQNGWIGRHEVYLSSDGVNWGSPVASGSWFADSTTKYSNFETRPARYVRLVAITEANGQPWTSIAEINVFQASSYTAPQPGLGRWGPTIDLPIVPSAAAIEPTSGRVLMWSSYRQDAFRDSPGGITLTSSWDPSTGIVSDRTVTVTGHDMFCPGISMDGNGQIVVSGGNDAKKTSLYDSSSDSWIPGPDMQVARGYNSSATMSDGRVFTIGGSYSGGQVEKNGEVYSPSSKTWTSLPNAKVNPMLTADKRGLYRSDNHAWLFGWKKGSVFQAGPSTAMNWYYTSGSGDVKSAGKRQSDRGVAPDAMCGNAVMYDAVKGKILTFGGSPDYEDSDATTNAHIITLGEPGTLPNTVFASNGLLFARTFHTSVVLPDGSVFITGGQQRGVPLEDSTPVFTPEIYVPEQDTFYKQNPNSIVRAYHSISLLLPDGRVFNGGGGLCGDCETNHFDAQIFTPNYLYDSNGNLATRPKITRTSTQSVVVGGWITIWTDSSISAASLIRYGTATHTVNTDQRRIGLTLTNNGGNSYSFQVPSDSGVALPGYWMLFVMNSAGVPSVASTINVTQGQTGHHHHHHR

SEQ ID NO: 81 - DNA, 1953 bp, Artificial Sequence
  Engineered variant of Galactose Oxidase from Fusarium graminearum
atggcatcagcaccgatcggggtagccatcccgcgcaacaactgggccgttacatgcgattccgcccagagtgggaatgaatgcattaaggcaattgacggtaataaagacacgttttggcacactcaatatggtgtaaacggagatcccaaaccgccgcacaccatcacgatcgatatgaaaacagtacaaaacgtgaatggcctttctgtactgccacgtcaggatggcaatcagaatggatggatcggacgtcacgaggtgtatttaagttctgatggggtgaattggggatcgcctgtagcgtctgggtcctggtttgccgattcctctacaaagtactctaattttgagacacgtccggcccgttacgtgcgccttgtcgccattaccgaagccaatgggcaaccgtggacttcaattgccgagattaacgtatttcaggcgtctagttacactgccccgcagccgggcttggggcgctggggcccgacaatcgatcttcccattgtgccatcggccgccgcaatcgagccaacgagcggtcgtgtcttgatgtggagctcttatcgtcaggatgcgtttcgtgactctcctggcggtattacactgacgagctcatgggaccctagcactggaattgtatccgatcgcactagtaccgttaccgggcacgacatgttttgccccggtatctcgatggacgggaacggtcagatcgtggtcagcggtggtaatgatgcaaagaaaacttccttatatgattcgagctcggactcttggattccgggcccggatatgcaggtcgcgcgtgggtataactcaagtgcgactatgagtgatgggcgcgtatttacgattggcggcagttatagtggcggtcaagttgagaagaacggggaggtttactccccgagctcgaagacttggacttcgctgccgaatgcaaaagttaaccccatgctgaccgccgataaacggggtctgtaccgtagcgataatcatgcttggctgtttgggtggaaaaagggtagcgtcttccaagcaggtccaagtactgccatgaactggtattatacatctgggtcgggggacgttaagagtgcagggaagcgtcaatcagaccgcggagtagccccagacgccatgtgcggtaatgccgtaatgtacgacgcagtcaaaggcaaaattttgactttcgggggctcgcccgattatgaggactcagatgcgactacaaatgcccatattatcacgctgggcgagcctggcacgagtccgaatacggtatttgcgagtaatgggttactgttcgctcgtacctttcatacctcggtggtccttccggacgggagtgtattcatcacaggaggccagcagcgcgcagttccactggaagatagcacacccgtatttactccagagatctacgttcccgaacaagatactttttacaaacaaaacccgaatagtatcgttcgtgcctatcattcgatcagcttgttgctgccggacggacgtgttttcaatggtggcggtggcttatgcggcgattgtgagacgaaccactttgatgcgcaaatctttacgccgaattatctttacgatagcaacgggaacttagccactcgccctaaaatcacccgtacctcaacccagtcagtcgtggtcggcgggtggatcaccatttggactgacatgtcgatctcggccgcaagtttaattcgctacggaactgctactcacacggtgaacaccgatcagcgacgcatcggcttgacgttaacgaacaacggaggtaattcgtacagctttcaagttccgtcggacagcggggttgctcttccgggatactggatgttgttcgttatgaattccgctggtgtaccctccgttgcgtcgacgattaacgttacccagggccaaactggccaccatcaccatcaccattag

SEQ ID NO: 82 - protein, 650 aa, Artificial Sequence
  Engineered variant of Galactose Oxidase from Fusarium graminearum
MASAPIGVAIPRNNWAVTCDSAQSGNECIKAIDGNKDTFWHTQYGVNGDPKPPHTITIDMKTVQNVNGLSVLPRQDGNQNGWIGRHEVYLSSDGVNWGSPVASGSWFADSSTKYSNFETRPARYVRLVAITEANGQPWTSIAEINVFQASSYTAPQPGLGRWGPTIDLPIVPSAAAIEPTSGRVLMWSSYRQDAFRDSPGGITLTSSWDPSTGIVSDRTSTVTGHDMFCPGISMDGNGQIVVSGGNDAKKTSLYDSSSDSWIPGPDMQVARGYNSSATMSDGRVFTIGGSYSGGQVEKNGEVYSPSSKTWTSLPNAKVNPMLTADKRGLYRSDNHAWLFGWKKGSVFQAGPSTAMNWYYTSGSGDVKSAGKRQSDRGVAPDAMCGNAVMYDAVKGKILTFGGSPDYEDSDATTNAHIITLGEPGTSPNTVFASNGLLFARTFHTSVVLPDGSVFITGGQQRAVPLEDSTPVFTPEIYVPEQDTFYKQNPNSIVRAYHSISLLLPDGRVFNGGGGLCGDCETNHFDAQIFTPNYLYDSNGNLATRPKITRTSTQSVVVGGWITIWTDMSISAASLIRYGTATHTVNTDQRRIGLTLTNNGGNSYSFQVPSDSGVALPGYWMLFVMNSAGVPSVASTINVTQGQTGHHHHHH

SEQ ID NO: 83 - DNA, 1953 bp, Artificial Sequence
  Engineered variant of Galactose Oxidase from Fusarium graminearum
atggcatcagcaccgatcggggtagccatcccgcgcaacaactgggccgttacatgcgattccgcccagagtgggaatgaatgcattaaggcaattgacggtaataaagacacgttttggcacactcaatatggtgtaaacggagatcccaaaccgccgcacaccatcacgatcgatatgaaaacagtacaaaacgtgaatggcctttctgtactgccacgtcaggatggcaatcagaatggatggatcggacgtcacgaggtgtatttaagttctgatggggtgaattggggatcgcctgtagcgtctgggtcctggtttgccgattccaccacaaagtactctaattttgagacacgtccggcccgttacgtgcgccttgtcgccattaccgaagccaatgggcaaccgtggacttcaattgccgagattaacgtatttcaggcgtctagttacactgccccgcagccgggcttggggcgctggggcccgacaatcgatcttcccattgtgccatcggccgccgcaatcgagccaacgagcggtcgtgtcttgatgtggagctcttatcgtcaggatgcgtttcgtgactctcctggcggtattacactgacgagctcatgggaccctagcactggaattgtatccgatcgcactagtaccgttaccgggcacgacatgttttgccccggtatctcgatggacgggaacggtcagatcgtggtcagcggtggtaatgatgcaaagaaaacttccttatatgattcgagctcggactcttggattccgggcccggatatgcaggtcgcgcgtgggtataactcaagtgcgactatgagtgatgggcgcgtatttacgattggcggcagttatagtggcggtcaagttgagaagaacggggaggtttactccccgagctcgaagacttggacttcgctgccgaatgcaaaagttaaccccatgctgaccgccgataaacggggtctgtaccgtagcgataatcatgcttggctgtttgggtggaaaaagggtagcgtcttccaagcaggtccaagtactgccatgaactggtattatacatctgggtcgggggacgttaagagtgcagggaagcgtcaatcagaccgcggagtagccccagacgccatgtgcggtaatgccgtaatgtacgacgcagtcaaaggcaaaattttgactttcgggggctcgcccgattatgagaattcagatgcgactacaaatgcccatattatcacgctgggcgagcctggcacgagtccaaatacggtatttgcgagtaatgggttactgttcgctcgtacctttcatacctcggtggtccttccggacgggagtgtattcatcacaggaggccagcagcgcgcggttccactggaagatagcacacccgtatttactccagagatctacgttcccgaacaagatactttttacaaacaaaacccgaatagtatcgttcgtgcctatcattcgatcagcttgttgctgccggacggacgtgttttcaatggtggcggtggcttatgcggcgattgtgagacgaaccactttgatgcgcaaatctttacgccgaattatctttacgatagcaacgggaacttagccactcgccctaaaatcacccgtacctcaacccagtcagtcgtggtcggcgggtggatcaccatttggactgacatgtcgatctcggccgcaagtttaattcgctacggaactgctactcacacggtgaacaccgatcagcgacgcatcggcttgacgttaacgaacaacggaggtaattcgtacagctttcaagttccgtcggacagcggggttgctcttccgggatactggatgttgttcgttatgaattccgctggtgtaccctccgttgcgtcgacgattaacgttacccagggccaaactggccaccatcaccatcaccattag

SEQ ID NO: 84 - protein, 650 aa, Artificial Sequence
  Engineered variant of Galactose Oxidase from Fusarium graminearum
MASAPIGVAIPRNNWAVTCDSAQSGNECIKAIDGNKDTFWHTQYGVNGDPKPPHTITIDMKTVQNVNGLSVLPRQDGNQNGWIGRHEVYLSSDGVNWGSPVASGSWFADSTTKYSNFETRPARYVRLVAITEANGQPWTSIAEINVFQASSYTAPQPGLGRWGPTIDLPIVPSAAAIEPTSGRVLMWSSYRQDAFRDSPGGITLTSSWDPSTGIVSDRTSTVTGHDMFCPGISMDGNGQIVVSGGNDAKKTSLYDSSSDSWIPGPDMQVARGYNSSATMSDGRVFTIGGSYSGGQVEKNGEVYSPSSKTWTSLPNAKVNPMLTADKRGLYRSDNHAWLFGWKKGSVFQAGPSTAMNWYYTSGSGDVKSAGKRQSDRGVAPDAMCGNAVMYDAVKGKILTFGGSPDYENSDATTNAHIITLGEPGTSPNTVFASNGLLFARTFHTSVVLPDGSVFITGGQQRAVPLEDSTPVFTPEIYVPEQDTFYKQNPNSIVRAYHSISLLLPDGRVFNGGGGLCGDCETNHFDAQIFTPNYLYDSNGNLATRPKITRTSTQSVVVGGWITIWTDMSISAASLIRYGTATHTVNTDQRRIGLTLTNNGGNSYSFQVPSDSGVALPGYWMLFVMNSAGVPSVASTINVTQGQTGHHHHHH

SEQ ID NO: 85 - DNA, 1953 bp, Artificial Sequence
  Engineered variant of Galactose Oxidase from Fusarium graminearum
atggcatcagcaccgatcggggtagccatcccgcgcaacaactgggccgttacatgcgattccgcccagagtgggaatgaatgcattaaggcaattgacggtaataaagacacgttttggcacactttctatggtgtaaacggagatcccaaaccgccgcacaccatcacgatcgatatgaaaacagtacaaaacgtgaatggcctttctgtactgccacgtcaggatggcaatcagaatggatggatcggacgtcacgaggtgtatttaagttctgatggggtgaattggggatcgcctgtagcgtctgggtcctggtttgccgattccaccacaaagtactctaattttgagacacgtccggcccgttacgtgcgccttgtcgccattaccgaagccaatgggcaaccgtggacttcaattgccgagattaacgtatttcaggcgtctagttacactgccccgcagccgggcttggggcgctggggcccgacaatcgatcttcccattgtgccatcggccgccgcaatcgagccaacgagcggtcgtgtcttgatgtggagctcttatcgtaacgatgcgtttcgcgactctcctggcggtattacactgacgagctcatgggaccctagcactggaattgtatccgatcgcacgagtaccgttaccgggcacgacatgttttgccccggtatctcgatggacgggaacggtcagatcgtggtcagcggtggtaatgatgcaaagaaaacttccttatatgattcgagctcggactcttggattccgggcccggatatgcaggtcgcgcgtgggtatcaatcaagtgcgactatgagtgatgggcgcgtatttacgattggcggcagttttagtggcggtcagtttgagaagaacggggaggtttactccccgagctcgaagacttggacttcgctgccgaatgcaaaagttaaccccatgctgaccgccgataaacggggtctgtaccgtagcgataatcatgcttggctgtttgggtggaaaaagggtagcgtcttccaagcaggtccaagtactgccatgaactggtattatacatctgggtcgggggacgttaagagtgcagggaagcgtcaatcagaccgcggagtagccccagacgccatgtgcggtaatgccgtaatgtacgacgcagtcaaaggcaaaattttgactttcgggggctcgcccgattatgaggactcagatgcgactacaaatgcccatattatcacgctgggcgagcctggcacgagtccgaatacggtatttgcgagtaatgggttactgttcgctcgtacctttcatacctcggtggtccttccggacgggagtgtattcatcacaggaggccagcagcgcggagttccactggaagatagcacacccgtatttactccagagatctacgttcccgaacaagatactttttacaaacaaaacccgaatagtatcgttcgtgcctatcattcgatcagcttgttgctgccggacggacgtgttttcaatggtggcggtggcttatgcggcgattgtgagacgaaccactttgatgcgcaaatctttacgccgaattatctttacgatagcaacgggaacttagccactcgccctaaaatcacccgtacctcaacccagtcagtcgtggtcggcgggtggatcaccatttggactgacatgtcgatctcggccgcaagtttaattcgctacggaactgctactcacacggtgaacaccgatcagcgacgcatcggcttgacgttaacgaacaacggaggtaattcgtacagctttcaagttccgtcggacagcggggttgctcttccgggatactggatgttgttcgttatgaattccgctggtgtaccctccgttgcgtcgacgattaacgttacccagggccaaactggccaccatcaccatcaccattag

SEQ ID NO: 86 - protein, 650 aa, Artificial Sequence
  Engineered variant of Galactose Oxidase from Fusarium graminearum
MASAPIGVAIPRNNWAVTCDSAQSGNECIKAIDGNKDTFWHTFYGVNGDPKPPHTITIDMKTVQNVNGLSVLPRQDGNQNGWIGRHEVYLSSDGVNWGSPVASGSWFADSTTKYSNFETRPARYVRLVAITEANGQPWTSIAEINVFQASSYTAPQPGLGRWGPTIDLPIVPSAAAIEPTSGRVLMWSSYRNDAFRDSPGGITLTSSWDPSTGIVSDRTSTVTGHDMFCPGISMDGNGQIVVSGGNDAKKTSLYDSSSDSWIPGPDMQVARGYQSSATMSDGRVFTIGGSFSGGQFEKNGEVYSPSSKTWTSLPNAKVNPMLTADKRGLYRSDNHAWLFGWKKGSVFQAGPSTAMNWYYTSGSGDVKSAGKRQSDRGVAPDAMCGNAVMYDAVKGKILTFGGSPDYEDSDATTNAHIITLGEPGTSPNTVFASNGLLFARTFHTSVVLPDGSVFITGGQQRGVPLEDSTPVFTPEIYVPEQDTFYKQNPNSIVRAYHSISLLLPDGRVFNGGGGLCGDCETNHFDAQIFTPNYLYDSNGNLATRPKITRTSTQSVVVGGWITIWTDMSISAASLIRYGTATHTVNTDQRRIGLTLTNNGGNSYSFQVPSDSGVALPGYWMLFVMNSAGVPSVASTINVTQGQTGHHHHHH

SEQ ID NO: 87 - DNA, 1953 bp, Artificial Sequence
  Engineered variant of Galactose Oxidase from Fusarium graminearum
atggcatcagcaccgatcgggagcgccatcccgcgcaacaactgggccgttacatgcgattccgcccagagtgggaatgaatgcattaaggcaattgacggtaataaagacacgttttggcacactcaatatggtgtaaacggagatcccaaaccgccgcacaccatcacgatcgatatgaaaacagtacaaaacgtgaatggcctttctgtactgccacgtcaggatggcaatcagaatggatggatcggacgtcacgaggtgtatttaagttctgatggggtgaattggggatcgcctgtagcgtctgggtcctggtttgccgattccaccacaaagtactctaattttgagacacgtccggcccgttacgtgcgccttgtcgccattaccgaagccaatgggcaaccgtggacttcaattgccgagattaacgtatttcaggcgtctagttacactgccccgcagccgggcttggggcgctggggcccgacaatcgatcttcccattgtgccatcggccgccgcaatcgagccaacgagcggtcgtgtcttgatgtggagctcttatcgtcaggatgcgtttcgtgactctcctggcggtattacactgacgagctcatgggaccctagcactggaattgtatccgatcgcactagtaccgttaccgggcacgacatgttttgccccggtatctcgatggacgggaacggtcagatcgtggtcagcggtggtaatgatgcaaagaaaacttccttatatgattcgagctcggactcttggattccgggcccggatatgcaggtcgcgcgtgggtatcaatcaagtgcgactatgagtgatgggcgcgtatttacgattggcggcagttttagtggcggtgtggttgagaagaacggggaggtttactccccgagctcgaagacttggacttcgctgccgaatgcaaaagttaaccccatgctgaccgccgataaacggggtctgtaccgtagcgataatcatgcttggctgtttgggtggaaaaagggtagcgtcttccaagcaggtccaagtactgccatgaactggtattatacatctgggtcgggggacgttaagagtgcagggaagcgtcaatcagaccgcggagtagccccagacgccatgtgcggtaatgccgtaatgtacgacgcagtcaaaggcaaaattttgactttcgggggctcgcccgattatgaggactcagatgcgactacaaatgcccatattatcacgctgggcgagcctggcacgagtccgaatacggtatttgcgagtaatgggttactgttcgctcgtacctttcatacctcggtggtccttccggacgggagtgtattcatcacaggaggccagcagcgcggagttccactggaagatagcacacccgtatttactccagagatctacgttcccgaacaagatactttttacaaacaaaacccgaatagtatcgttcgtgcctatcattcgatcagcttgttgctgccggacggacgtgttttcaatggtggcggtggcttatgcggcgattgtgagacgaaccactttgatgcgcaaatctttacgccgaattatctttacgatagcaacgggaacttagccactcgccctaaaatcacccgtacctcaacccagtcagtcgtggtcggcgggtggatcaccatttggactgacatgtcgatctcggccgcaagtttaattcgctacggaactgctactcacacggtgaacaccgatcagcgacgcatcggcttgacgttaacgaacaacggaggtaattcgtacagctttcaagttccgtcggacagcggggttgctcttccgggatactggatgttgttcgttatgaattccgctggtgtaccctccgttgcgtcgacgattaacgttacccagggccaaactggccaccatcaccatcaccattag

SEQ ID NO: 88 - protein, 650 aa, Artificial Sequence
  Engineered variant of Galactose Oxidase from Fusarium graminearum
MASAPIGSAIPRNNWAVTCDSAQSGNECIKAIDGNKDTFWHTQYGVNGDPKPPHTITIDMKTVQNVNGLSVLPRQDGNQNGWIGRHEVYLSSDGVNWGSPVASGSWFADSTTKYSNFETRPARYVRLVAITEANGQPWTSIAEINVFQASSYTAPQPGLGRWGPTIDLPIVPSAAAIEPTSGRVLMWSSYRQDAFRDSPGGITLTSSWDPSTGIVSDRTSTVTGHDMFCPGISMDGNGQIVVSGGNDAKKTSLYDSSSDSWIPGPDMQVARGYQSSATMSDGRVFTIGGSFSGGVVEKNGEVYSPSSKTWTSLPNAKVNPMLTADKRGLYRSDNHAWLFGWKKGSVFQAGPSTAMNWYYTSGSGDVKSAGKRQSDRGVAPDAMCGNAVMYDAVKGKILTFGGSPDYEDSDATTNAHIITLGEPGTSPNTVFASNGLLFARTFHTSVVLPDGSVFITGGQQRGVPLEDSTPVFTPEIYVPEQDTFYKQNPNSIVRAYHSISLLLPDGRVFNGGGGLCGDCETNHFDAQIFTPNYLYDSNGNLATRPKITRTSTQSVVVGGWITIWTDMSISAASLIRYGTATHTVNTDQRRIGLTLTNNGGNSYSFQVPSDSGVALPGYWMLFVMNSAGVPSVASTINVTQGQTGHHHHHH

SEQ ID NO: 89 - DNA, 1953 bp, Artificial Sequence
  Engineered variant of Galactose Oxidase from Fusarium graminearum
atggcatcagcaccgatcggggtagccatcccgcgcaacaactgggccgttacatgcgattccgcccagagtgggaatgaatgcattaaggcaattgacggtaataaagacacgttttggcacactcaatatggtgtaaacggagatcccaaaccgccgcacaccatcacgatcgatatgaaaacagtacaaaacgtgaatggcctttctgtactgccacgtcaggatggcaatcagaatggatggatcggacgtcacgaggtgtatttaagttctgatggggtgaattggggatcgcctgtagcgtctgggtcctggtttgccgattccaccacaaagtactctaattttgagacacgtccggcccgttacgtgcgccttgtcgccattaccgaagccaatgggcaaccgtggacttcaattgccgagattaacgtatttcaggcgtctagttacactgccccgcagccgggcttggggcgctggggcccgacaatcgatcttcccattgtgccatcggccgccgcaatcgagccaacgagcggtcgtgtcttgatgtggagctcttatcgtcaggatgcgtttcgtggctctcctggcggtattacactgacgagctcatgggaccctagcactggaattgtatccgatcgcactgtgaccgttaccgggcacgacatgttttgccccggtatctcgatggacgggaacggtcagatcgtggtcagcggtggtaatgatgcaaagaaaacttccttatatgattcgagctcggactcttggattccgggcccggatatgcaggtcgcgcgtgggtataactcaagtgcgactatgagtgatgggcgcgtatttacgattggcggcagttatagtggcggtcaagttgagaagaacggggaggtttactccccgagctcgaagacttggacttcgctgccgaatgcaaaagttaaccccatgctgaccgccgataaacgtggtctgtaccgtagcgataatcatgcttggctgtttgggtggaaaaagggtagcgtcttccaagcaggtccaagtactgccatgaactggtattatacatctgggtcgggggacgttaagagtgcagggaagcgtcaatcagaccgcggagtagccccagacgccatgtgcggtaatgccgtaatgtacgacgcagtcaaaggcaaaattttgactttcgggggctcgcccgattatgaggactcagatgcgactacaaatgcccatattatcacgctgggcgagcctggcacgctgccgaatacggtatttgcgagtaatgggttactgttcgctcgtacctttcatacctcggtggtccttccggacgggagtgtgttcatcacaggaggccagcagcgcggagttccactggaagatagcacacccgtatttactccagagatctacgttcccgaacaagatactttttacaaacaaaacccgaatagtatcgttcgtgcctatcattcgatcagcttgttgctgccggacggacgtgttttcaatggtggcggtggcttatgcggcgattgtgagacgaaccactttgatgcgcaaatctttacgccgaattatctttacgatagcaacgggaacttagccactcgccctaaaatcacccgtacctcaacccagtcagtcgtggtcggcgggtggatcaccatttggactgacatgtcgatctcggccgcaagtttaattcgctacggaactgctactcacacggtgaacaccgatcagcgacgcatcggcttgacgttaacgaacaacggaggtaattcgtacagctttcaagttccgtcggacagcggggttgctcttccgggatactggatgttgttcgttatgaattccgctggtgtaccctccgttgcgtcgacgattaacgttacccagggccaaactggccaccatcaccatcaccattag

SEQ ID NO: 90 - protein, 650 aa, Artificial Sequence
  Engineered variant of Galactose Oxidase from Fusarium graminearum
MASAPIGVAIPRNNWAVTCDSAQSGNECIKAIDGNKDTFWHTQYGVNGDPKPPHTITIDMKTVQNVNGLSVLPRQDGNQNGWIGRHEVYLSSDGVNWGSPVASGSWFADSTTKYSNFETRPARYVRLVAITEANGQPWTSIAEINVFQASSYTAPQPGLGRWGPTIDLPIVPSAAAIEPTSGRVLMWSSYRQDAFRGSPGGITLTSSWDPSTGIVSDRTVTVTGHDMFCPGISMDGNGQIVVSGGNDAKKTSLYDSSSDSWIPGPDMQVARGYNSSATMSDGRVFTIGGSYSGGQVEKNGEVYSPSSKTWTSLPNAKVNPMLTADKRGLYRSDNHAWLFGWKKGSVFQAGPSTAMNWYYTSGSGDVKSAGKRQSDRGVAPDAMCGNAVMYDAVKGKILTFGGSPDYEDSDATTNAHIITLGEPGTLPNTVFASNGLLFARTFHTSVVLPDGSVFITGGQQRGVPLEDSTPVFTPEIYVPEQDTFYKQNPNSIVRAYHSISLLLPDGRVFNGGGGLCGDCETNHFDAQIFTPNYLYDSNGNLATRPKITRTSTQSVVVGGWITIWTDMSISAASLIRYGTATHTVNTDQRRIGLTLTNNGGNSYSFQVPSDSGVALPGYWMLFVMNSAGVPSVASTINVTQGQTGHHHHHH

SEQ ID NO: 91 - DNA, 1953 bp, Artificial Sequence
  Engineered variant of Galactose Oxidase from Fusarium graminearum
atggcatcagcaccgatcggggtagccatcccgcgcaacaactgggccgttacatgcgattccgcccagagtgggaatgaatgcattaaggcaattgacggtaataaagacacgttttggcacactcagtatggtgtaaacggagatcccaaaccgccgcacaccatcacgatcgatatgaaaacagtacaaaacgtgaatggcctttctgtactgccacgtcaggatggcaatcagaatggatggatcggacgtcacgaggtgtatttaagttctgatggggtgaattggggatcgcctgtagcgtctgggtcctggtttgccgattccaccacaaagtactctaattttgagacacgtccggcccgttacgtgcgccttgtcgccattaccgaagccaatgggcaaccgtggacttcaattgccgagattaacgtatttcaggcgtctagttacactgccccgcagccgggcttggggcgctggggcccgacaatcgatcttcccattgtgccagcggccgccgcaatcgagccaacgagcggtcgtgtcttgatgtggagctcttatcgtcaggatgcgtttcgtgactctcctggcggtattacactgacgagctcatgggaccctagcactggaattgtatccgatcgcactagtaccgttaccgggcacgacatgttttgccccggtatctcgatggacgggaacggtcagatcgtggtcagcggtggtaatgatgcaaagaaaacttccttatatgattcgagctcggactcttggattccgggcccggatatgcaggtcgcgcgtgggtataactcaagtgcgactatgagtgatgggcgcgtatttacgattggcggcagttttagtggcggtcaggttgagaagaacggggaggtttactccccgagctcgaagacttggacttcgctgccgaatgcaaaagttaaccccatgctgaccgccgataaacggggtctgtaccgtagcgataatcatgcttggctgtttgggtggaaaaagggtagcgtcttccaagcaggtccaagtactgccatgaactggtattatacatctgggtcgggggacgttaagagtgcagggaagcgtcaatcagaccgcggagtagccccagacgccatgtgcggtaatgccgtaatgtacgacgcagtcaaaggcaaaattttgactttcgggggctcgcccgattatgaggactcagatgcgactacaaatgcccatattatcacgctgggcgagcctggcacgagtccgaatacggtatttgcgagtaatgggttactgttcgctcgtacctttcatacctcggtggtccttccggacgggagtgtattcatcacaggaggccagcagcgcggagttccactggaagatagcacacccgtatttactccagagatctacgttcccgaacaagatactttttacaaacaaaacccgaatagtatcgttcgtgcctatcattcgatcagcttgttgctgccggacggacgtgttttcaatggtggcggtggcttatgcggcgattgtgagacgaaccactttgatgcgcaaatctttacgccgaattatctttacgatagcaacgggaacttagccactcgccctaaaatcacccgtacctcaacccagtcagtcgtggtcggcgggtggatcaccatttggactgacatgtcgatctcggccgcaagtttaattcgctacggaactgctactcacacggtgaacaccgatcagcgacgcatcggcttgacgttaacgaacaacggaggtaattcgtacagctttcaagttccgtcggacagcggggttgctcttccgggatactggatgttgttcgttatgaattccgctggtgtaccctccgttgcgtcgacgattaacgttacccagggccaaactggccaccatcaccatcaccattag

SEQ ID NO: 92 - protein, 650 aa, Artificial Sequence
  Engineered variant of Galactose Oxidase from Fusarium graminearum
MASAPIGVAIPRNNWAVTCDSAQSGNECIKAIDGNKDTFWHTQYGVNGDPKPPHTITIDMKTVQNVNGLSVLPRQDGNQNGWIGRHEVYLSSDGVNWGSPVASGSWFADSTTKYSNFETRPARYVRLVAITEANGQPWTSIAEINVFQASSYTAPQPGLGRWGPTIDLPIVPAAAAIEPTSGRVLMWSSYRQDAFRDSPGGITLTSSWDPSTGIVSDRTSTVTGHDMFCPGISMDGNGQIVVSGGNDAKKTSLYDSSSDSWIPGPDMQVARGYNSSATMSDGRVFTIGGSFSGGQVEKNGEVYSPSSKTWTSLPNAKVNPMLTADKRGLYRSDNHAWLFGWKKGSVFQAGPSTAMNWYYTSGSGDVKSAGKRQSDRGVAPDAMCGNAVMYDAVKGKILTFGGSPDYEDSDATTNAHIITLGEPGTSPNTVFASNGLLFARTFHTSVVLPDGSVFITGGQQRGVPLEDSTPVFTPEIYVPEQDTFYKQNPNSIVRAYHSISLLLPDGRVFNGGGGLCGDCETNHFDAQIFTPNYLYDSNGNLATRPKITRTSTQSVVVGGWITIWTDMSISAASLIRYGTATHTVNTDQRRIGLTLTNNGGNSYSFQVPSDSGVALPGYWMLFVMNSAGVPSVASTINVTQGQTGHHHHHH

SEQ ID NO: 93 - DNA, 1953 bp, Artificial Sequence
  Engineered variant of Galactose Oxidase from Fusarium graminearum
atggcatcagcaccgatcggggtagccatcccgcgcaacaactgggccgttacatgcgattccgcccagagtgggaatgaatgcattaaggcaattgacggtaataaagacacgttttggcacactcagtatggtgtaaacggagatcccaaaccgccgcacaccatcacgatcgatatgaaaacaacgcaaaacgtgaatggcctttctgtactgccacgtcaggatggcaatcagaatggatggatcggacgtcacgaggtgtatttaagttctgatggggtcaattggggatcgcctgtagcgtctgggtcctggtttgccgattccaccacaaagtactctaattttgagacacgtccggcccgttacgtgcgccttgtcgccattaccgaagccaatgggcaaccgtggacttcaattgccgagattaacgtatttcaggcgtctagttacactgccccgcagccgggcttggggcgctggggcccgacaatcgatcttcccattgtgccagcggccgccgcaatcgagccaacgagcggtcgtgtcttgatgtggagctcttatcgtaacgatgcgtttcgtgactctcctggcggtattacactgacgagctcatgggaccctagcactggaattgtatccgatcgcactagtaccgttaccgggcacgacatgttttgccccggtatctcgatggacgggaacggtcagatcgtggtcagcggtggtaatgatgcaaagaaaacttccttatatgattcgagctcggactcttggattccgggcccggatatgcaggtcgcgcgtgggtatcaatcaagtgcgactatgagtgatgggcgcgtatttacgattggcggcagttatagtggcggtcaggttgagaagaacggggaggtttactccccgagctcgaagacttggacttcgctgccgaatgcaaaagttaaccccatgctgaccgccgataaacggggtctgtaccgtagcgataatcatgcttggctgtttgggtggaaaaagggtagcgtcttccaagcaggtccaagtactgccatgaactggtattatacatctgggtcgggggacgttaagagtgcagggaagcgtcaatcagaccgcggagtagccccagacgccatgtgcggtaatgccgtaatgtacgacgcagtcaaaggcaaaattttgactttcgggggctcgcccgattatgaggactcagatgcgactacaaatgcccatattatcacgctgggcgagcctggcacgagtccgaatacggtatttgcgagtaatgggttactgttcgctcgtacctttcatacctcggtggtccttccggacgggagtgtattcatcacaggaggccagcagcgcggagttccactggaagatagcacacccgtatttactccagagatctacgttcccgaacaagatactttttacaaacaaaacccgaatagtatcgttcgtgcctatcattcgatcagcttgttgctgccggacggacgtgttttcaatggtggcggtggcttatgcggcgattgtgagacgaaccactttgatgcgcaaatctttacgccgaattatctttacgatagcaacgggaacttagccactcgccctaaaatcacccgtacctcaacccagtcagtcgtggtcggcgggtggatcaccatttggactgacatgtcgatctcggccgcaagtttaattcgctacggaactgctactcacacggtgaacaccgatcagcgacgcatcggcttgacgttaacgaacaacggaggtaattcgtacagctttcaagttccgtcggacagcggggttgctcttccgggatactggatgttgttcgttatgaattccgctggtgtaccctccgttgcgtcgacgattaacgttacccagggccaaactggccaccatcaccatcaccattag

SEQ ID NO: 94 - protein, 650 aa, Artificial Sequence
  Engineered variant of Galactose Oxidase from Fusarium graminearum
MASAPIGVAIPRNNWAVTCDSAQSGNECIKAIDGNKDTFWHTQYGVNGDPKPPHTITIDMKTTQNVNGLSVLPRQDGNQNGWIGRHEVYLSSDGVNWGSPVASGSWFADSTTKYSNFETRPARYVRLVAITEANGQPWTSIAEINVFQASSYTAPQPGLGRWGPTIDLPIVPAAAAIEPTSGRVLMWSSYRNDAFRDSPGGITLTSSWDPSTGIVSDRTSTVTGHDMFCPGISMDGNGQIVVSGGNDAKKTSLYDSSSDSWIPGPDMQVARGYQSSATMSDGRVFTIGGSYSGGQVEKNGEVYSPSSKTWTSLPNAKVNPMLTADKRGLYRSDNHAWLFGWKKGSVFQAGPSTAMNWYYTSGSGDVKSAGKRQSDRGVAPDAMCGNAVMYDAVKGKILTFGGSPDYEDSDATTNAHIITLGEPGTSPNTVFASNGLLFARTFHTSVVLPDGSVFITGGQQRGVPLEDSTPVFTPEIYVPEQDTFYKQNPNSIVRAYHSISLLLPDGRVFNGGGGLCGDCETNHFDAQIFTPNYLYDSNGNLATRPKITRTSTQSVVVGGWITIWTDMSISAASLIRYGTATHTVNTDQRRIGLTLTNNGGNSYSFQVPSDSGVALPGYWMLFVMNSAGVPSVASTINVTQGQTGHHHHHH

SEQ ID NO: 95 - DNA, 1953 bp, Artificial Sequence
  Engineered variant of Galactose Oxidase from Fusarium graminearum
atggcatcagcaccgatcggggtagccatcccgcgcaacaactgggccgttacatgcgattccgcccagagtgggaatgaatgcattaaggcaattgacggtaataaagacacgttttggcacactcaatatggtgtaaacggagatcccaaaccgccgcacaccatcacgatcgatatgaaaacagtacaaaacgtgaatggcctttctgtactgccacgtcaggatggcaatcagaatggatggatcggacgtcacgaggtgtatttaagttctgatggggtgaattggggatcgcctgtagcgtctgggtcctggtttgccgattccaccacaaagtactctaattttgagacacgtccggcccgttacgtgcgccttgtcgccattaccgaagccaatgggcaaccgtggacttcaattgccgagattaacgtatttcaggcgtctagttacactgccccgcagccgggcttggggcgctggggcccgacaatcgatcttcccattgtgccatcggccgccgcaatcgagccaacgagcggtcgtgtcttgatgtggagctcttatcgtcaggatgcgtttcgtgactctcctggcggtattacactgacgagctcatgggaccctagcactggaattgtatccgatcgcactagtaccgttaccgggcacgacatgttttgccccggtatctcgatggacgggaacggtcagatcgtggtcaccggtggtaatgatgcaaagaaaacttccttatatgattcgagctcggactcttggattccgggcccggatatgcaggtcgcgcgtgggtatcaatcaagtgcgactatgagtgatgggcgcgtatttacgattggcggcagttttagtggcggtgtggttgagaagaacggggaggtttactccccgagctcgaagacttggacttcgctgccgaatgcaaaagttaaccccatgctgaccgccgataaacggggtctgtaccgtagcgataatcatgcttggctgtttgggtggaaaaagggtagcgtcttccaagcaggtccaagtactgccatgaactggtattatacatctgggtcgggggacgttaagagtgcagggaagcgtcaatcagaccgcggagtagccccagacgccatgtgcggtaatgccgtaatgtacgacgcagtcaaaggcaaaattttgactttcgggggctcgcccgattatgaggactcagatgcgactacaaatgcccatattatcacgctgggcgagcctggcacgagtccgaatacggtatttgcgagtaatgggttactgttcgctcgtacctttcatacctcggtggtccttccggacgggagtgtattcatcacaggaggccagcagcgcggagttccactggaagatagcacacccgtatttactccagagatctacgttcccgaacaagatactttttacaaacaaaacccgaatagtatcgttcgtgcctatcattcgatcagcttgttgctgccggacggacgtgttttcaatggtggcggtggcttatgcggcgattgtgagacgaaccactttgatgcgcaaatctttacgccgaattatctttacgatagcaacgggaacttagccactcgccctaaaatcacccgtacctcaacccagtcagtcgtggtcggcgggtggatcaccatttggactgacatgtcgatctcggccgcaagtttaattcgctacggaactgctactcacacggtgaacaccgatcagcgacgcatcggcttgacgttaacgaacaacggaggtaattcgtacagctttcaagttccgtcggacagcggggttgctcttccgggatactggatgttgttcgttatgaattccgctggtgtaccctccgttgcgtcgacgattcgcgttacccagggccaaactggccaccatcaccatcaccattag

SEQ ID NO: 96 - protein, 650 aa, Artificial Sequence
  Engineered variant of Galactose Oxidase from Fusarium graminearum
MASAPIGVAIPRNNWAVTCDSAQSGNECIKAIDGNKDTFWHTQYGVNGDPKPPHTITIDMKTVQNVNGLSVLPRQDGNQNGWIGRHEVYLSSDGVNWGSPVASGSWFADSTTKYSNFETRPARYVRLVAITEANGQPWTSIAEINVFQASSYTAPQPGLGRWGPTIDLPIVPSAAAIEPTSGRVLMWSSYRQDAFRDSPGGITLTSSWDPSTGIVSDRTSTVTGHDMFCPGISMDGNGQIVVTGGNDAKKTSLYDSSSDSWIPGPDMQVARGYQSSATMSDGRVFTIGGSFSGGVVEKNGEVYSPSSKTWTSLPNAKVNPMLTADKRGLYRSDNHAWLFGWKKGSVFQAGPSTAMNWYYTSGSGDVKSAGKRQSDRGVAPDAMCGNAVMYDAVKGKILTFGGSPDYEDSDATTNAHIITLGEPGTSPNTVFASNGLLFARTFHTSVVLPDGSVFITGGQQRGVPLEDSTPVFTPEIYVPEQDTFYKQNPNSIVRAYHSISLLLPDGRVFNGGGGLCGDCETNHFDAQIFTPNYLYDSNGNLATRPKITRTSTQSVVVGGWITIWTDMSISAASLIRYGTATHTVNTDQRRIGLTLTNNGGNSYSFQVPSDSGVALPGYWMLFVMNSAGVPSVASTIRVTQGQTGHHHHHH

SEQ ID NO: 97 - DNA, 1953 bp, Artificial Sequence
  Engineered variant of Galactose Oxidase from Fusarium graminearum
atggcatcagcaccgatcggggtagccatcccgcgcaacaactgggccgttacatgcgattccgcccagagtgggaatgaatgcattaaggcaattgacggtaataaagacacgttttggcacactcaatatggtgtaaacggagatcccaaaccgccgcacaccatcacgatcgatatgaaaacagtacaaaacgtgaatggcctttctgtactgccacgtcaggatggcaatcagaatggatggatcggacgtcacgaggtgtatttaagttctgatggggtgaattggggatcgcctgtagcgtctgggtcctggtttgccgattccaccacaaagtactctaattttgagacacgtccggcccgttacgtgcgccttgtcgccattaccgaagccaatgggcaaccgtggacttcaattgccgagattaacgtatttcaggcgtctagttacactgccccgcagccgggcttggggcgctggggcccgacaatcgatcttcccattgtgccatcggccgccgcaatcgagccaacgagcggtcgtgtcttgatgtggagctcttatcgtcaggatgcgtttcgtgactctcctggcggtattacactgacgagctcatgggaccctagcactggaattgtatccgatcgcactagtaccgttaccgggcacgacatgttttgccccggtatctcgatggacgggaacggtcagatcgtggtcagcggtggtaatgatgcaaagaaaacttccttatatgattcgagctcggactcttggattccgggcccggatatgcaggtcgcgcgtgggtataactcaagtgcgactatgagtgatgggcgcgtatttacgattggcggcagttttagtggcggtcaagttgagaagaacggggaggtttactccccgagctcgaagacttggacttcgctgccgaatgcaaaagttaaccccatgctgaccgccgataaacggggtctgtaccgtagcgataatcatgcttggctgtttgggtggaaaaagggtagcgtcttccaagcaggtccaagtactgccatgaactggtattatacatctgggtcgggggacgttaagagtgcagggaagcgtcaatcagaccgcggagtagccccagacgccatgtgcggtaatgccgtaatgtacgacgcagtcaaaggcaaaattttgactttcgggggctcgcccgattatgaggattcagatgcgactacaaatgcccatattatcacgctgggcgagcctggcacgagtccgaatacggtatttgcgagtaatgggttaaatttcgctcgtacctttcatacctcggtggtccttccggacgggagtgtattcatcacaggaggccagcagcgcggggttccactggaagatagcacacccgtatttactccagagatctacgttcccgaacaagatactttttacaaacaaaacccgaatagtatcgttcgtgcctatcattcgatcagcttgttgctgccggacggacgtgttttcaatggtggcggtggcttatgcggcgattgtgagacgaaccactttgatgcgcaaatctttacgccgaattatctttacgatagcaacgggaacttagccactcgccctaaaatcacccgtacctcaacccagtcagtcgtggtcggcgggtggatcaccatttggactgacatgtcgatctcggccgcaagtttaattcgctacggaactgctactcacacggtgaacaccgatcagcgacgcatcggcttgacgttaacgaacaacggaggtaattcgtacagctttcaagttccgtcggacagcggggttgctcttccgggatactggatgttgttcgttatgaattccgctggtgtaccctccgttgcgtcgacgattaacgttacccagggccaaactggccaccatcaccatcaccattag

SEQ ID NO: 98 - protein, 650 aa, Artificial Sequence
  Engineered variant of Galactose Oxidase from Fusarium graminearum
MASAPIGVAIPRNNWAVTCDSAQSGNECIKAIDGNKDTFWHTQYGVNGDPKPPHTITIDMKTVQNVNGLSVLPRQDGNQNGWIGRHEVYLSSDGVNWGSPVASGSWFADSTTKYSNFETRPARYVRLVAITEANGQPWTSIAEINVFQASSYTAPQPGLGRWGPTIDLPIVPSAAAIEPTSGRVLMWSSYRQDAFRDSPGGITLTSSWDPSTGIVSDRTSTVTGHDMFCPGISMDGNGQIVVSGGNDAKKTSLYDSSSDSWIPGPDMQVARGYNSSATMSDGRVFTIGGSFSGGQVEKNGEVYSPSSKTWTSLPNAKVNPMLTADKRGLYRSDNHAWLFGWKKGSVFQAGPSTAMNWYYTSGSGDVKSAGKRQSDRGVAPDAMCGNAVMYDAVKGKILTFGGSPDYEDSDATTNAHIITLGEPGTSPNTVFASNGLNFARTFHTSVVLPDGSVFITGGQQRGVPLEDSTPVFTPEIYVPEQDTFYKQNPNSIVRAYHSISLLLPDGRVFNGGGGLCGDCETNHFDAQIFTPNYLYDSNGNLATRPKITRTSTQSVVVGGWITIWTDMSISAASLIRYGTATHTVNTDQRRIGLTLTNNGGNSYSFQVPSDSGVALPGYWMLFVMNSAGVPSVASTINVTQGQTGHHHHHH

SEQ ID NO: 99 - DNA, 1953 bp, Artificial Sequence
  Engineered variant of Galactose Oxidase from Fusarium graminearum
atggcatcagcaccgatcggggtagccatcccgcgcaacaactgggccgttacatgcgattccgcccagagtgggaatgaatgcattaaggcaattgacggtaataaagacacgttttggcacactcaatatggtgtaaacggagatcccaaaccgccgcacaccatcacgatcgatatgaaaacagtacaaaacgtgaatggcctttctgtactgccacgtcaggatggcaatcagaatggatggatcggacgtcacgaggtgtatttaagttctgatggggtgaattggggatcgcctgtagcgtctgggtcctggtttgccgattccaccacaaagtactctaattttgagacacgtccggcccgttacgtgcgccttgtcgccattaccgaagccaatgggcaaccgtggacttcaattgccgagattaacgtatttcaggcgtctagttacactgccccgcagccgggcttggggcgctggggcccgacaatcgatcttcccattgtgccatcggccgccgcaatcgagccaacgagcggtcgtgtcttgatgtggagctcttatcgtcaggatgcgtttcgtgactctcctggcggtattacactgacgagctcatgggaccctagcactggaattgtatccgatcgcactgtgaccgttaccgggcacgacatgttttgccccggtatctcgatggacgggaacggtcagatcgtggtcagcggtggtaatgatgcaaagaaaacttccttatatgattcgagctcggactcttggattccgggcccggatatgcaggtcgcgcgtgggtataactcaagtgcgactatgagtgatgggcgcgtatttacgattggcggcagttatagtggcggtcgcgttgagaagaacggggaggtttactccccgagctcgaagacttggacttcgctgccgaatgcaaaagttaaccccatgctgaccgccgataaacggggtctgtaccgtagcgataatcatgcttggctgtttgggtggaaaaagggtagcgtcttccaagcaggtccaagtactgccatgaactggtattatacatctgggtcgggggacgttaagagtgcagggaagcgtcaatcagatcgcggagtagccccagacgccatgtgcggtaatgccgtaatgtacgacgcagtcaaaggcaaaattttgactttcgggggctcgcccgattatgaggactcagatgcgactacaaatgcccatattatcacgctgggcgagcctggcacgagcccgaatacggtatttgcgagtaatgggttactgttcgctcgtacctttcatacctcggtggtccttccggacgggagtgtgttcatcacaggaggccagcagcgcggagttccactggaagatagcacacccgtatttactccagagatctacgttcccgaacaagatactttttacaaacaaaacccgaatagtatcgttcgtgcctatcattcgatcagcttgttgctgccggacggacgtgttttcaatggtggcggtggcttatgcggcgattgtgagacgaaccactttgatgcgcaaatctttacgccgaattatctttacgatagcaacgggaacttagccactcgccctaaaatcacccgtacctcaacccagtcagtcgtggtcggcgggtggatcaccatttggactgacatgtcgatctcggccgcaagtttaattcgctacggaactgctactcacacggtgaacaccgatcagcgacgcatcggcttgacgttaacgaacaacggaggtaattcgtacagctttcaagttccgtcggacagcggggttgctcttccgggatactggatgttgttcgttatgaattccgctggtgtaccctccgttgcgtcgacgattaacgttacccagggccaaactggccaccatcaccatcaccataag

SEQ ID NO: 100 - protein, 651 aa, Artificial Sequence
  Engineered variant of Galactose Oxidase from Fusarium graminearum
MASAPIGVAIPRNNWAVTCDSAQSGNECIKAIDGNKDTFWHTQYGVNGDPKPPHTITIDMKTVQNVNGLSVLPRQDGNQNGWIGRHEVYLSSDGVNWGSPVASGSWFADSTTKYSNFETRPARYVRLVAITEANGQPWTSIAEINVFQASSYTAPQPGLGRWGPTIDLPIVPSAAAIEPTSGRVLMWSSYRQDAFRDSPGGITLTSSWDPSTGIVSDRTVTVTGHDMFCPGISMDGNGQIVVSGGNDAKKTSLYDSSSDSWIPGPDMQVARGYNSSATMSDGRVFTIGGSYSGGRVEKNGEVYSPSSKTWTSLPNAKVNPMLTADKRGLYRSDNHAWLFGWKKGSVFQAGPSTAMNWYYTSGSGDVKSAGKRQSDRGVAPDAMCGNAVMYDAVKGKILTFGGSPDYEDSDATTNAHIITLGEPGTSPNTVFASNGLLFARTFHTSVVLPDGSVFITGGQQRGVPLEDSTPVFTPEIYVPEQDTFYKQNPNSIVRAYHSISLLLPDGRVFNGGGGLCGDCETNHFDAQIFTPNYLYDSNGNLATRPKITRTSTQSVVVGGWITIWTDMSISAASLIRYGTATHTVNTDQRRIGLTLTNNGGNSYSFQVPSDSGVALPGYWMLFVMNSAGVPSVASTINVTQGQTGHHHHHHK

SEQ ID NO: 101 - DNA, 1953 bp, Artificial Sequence
  Engineered variant of Galactose Oxidase from Fusarium graminearum
atggcatcagcaccgatcgggagcgccatcccgcgcaacaactgggccgttacatgcgattccgcccagagtgggaatgaatgcaataaggcaattgacggtaataaagacacgttttggcacactcagtatggtgtaaacggagatcccaaaccgccgcacaccatcacgatcgatatgaaaacagtacaaaacgtgaatggcctttctgtactgccacgtcaggatggcaatcagaatggatggatcggacgtcacgaggtgtatttaagttctgatggggtgaattggggatcgcctgtagcgtctgggtcctggtttgccgattccaccacaaagtactctaattttgagacacgtccggcccgttacgtgcgccttgtcgccattaccgaagccaatgggcaaccgtggacttcaattgccgagattaacgtatttcaggcgtctagttacactgccccgcagccgggcttggggcgctggggcccgacaatcgatcttcccattgtgccatcggccgccgcaatcgagccaacgagcggtcgtgtcttgatgtggagctcttatcgtaacgatgcgtttgaagactctcctggcggtattacactgacgagctcatgggaccctagcactggaattgtatccgatcgcacgagtaccgttaccgggcacgacatgttttgccccggtatctcgatggacgggaacggtcagatcgtggtcagcggtggtaatgatgcaaagaaaacttccttatatgattcgagctcggactcttggattccgggcccggatatgcaggtcgcgcgtgggtatcaatcaagtgcgactatgagtgatgggcgcgtatttacgattggcggcagttatagtggcggtgtggttgagaagaacggggaggtttactccccgagctcgaagacttggacttcgctgccgaatgcaaaagttaaccccatgctgaccgccgataaacggggtctgtaccgtagcgataatcatgcttggctgtttgggtggaaaaagggtagcgtcttccaagcaggtccaagtactgccatgaactggtattatacatctgggtcgggggacgttaagagtgcagggaagcgtcaatcagaccgcggagtagccccagacgccatgtgcggtaatgccgtaatgtacgacgcagtcaaaggcaaaattttgactttcgggggctcgcccgattatgaggactcagatgcgactacaaatgcccatattatcacgctgggcgagcctggcacgagtccgaatacggtatttgcgagtaatgggttactgttcgctcgtacctttcatacctcggtggtccttccggacgggagtgtattcatcacaggaggccagcagcgcggagttccactggaagatagcacacccgtatttactccagagatctacgttcccgaacaagatactttttacaaacaaaacccgaatagtatcgttcgtgcctatcattcgatcagcttgttgctgccggacggacgtgttttcaatggtggcggtggcttatgcggcgattgtgagacgaaccactttgatgcgcaaatctttacgccgaattatctttacgatagcaacgggaacttagccactcgccctaaaatcacccgtacctcaacccagtcagtcgtggtcggcgggtggatcaccatttggactgacatgtcgatctcggccgcaagtttaattcgctacggaactgctactcacacggtgaacaccgatcagcgacgcatcggcttgacgttaacgaacaacggaggtaattcgtacagctttcaagttccgtcggacagcggggttgctcttccgggatactggatgttgttcgttatgaattccgctggtgtaccctccgttgcgtcgacgattaacgttacccagggccaaactggccaccatcaccatcaccattag

SEQ ID NO: 102 - protein, 650 aa, Artificial Sequence
  Engineered variant of Galactose Oxidase from Fusarium graminearum
MASAPIGSAIPRNNWAVTCDSAQSGNECNKAIDGNKDTFWHTQYGVNGDPKPPHTITIDMKTVQNVNGLSVLPRQDGNQNGWIGRHEVYLSSDGVNWGSPVASGSWFADSTTKYSNFETRPARYVRLVAITEANGQPWTSIAEINVFQASSYTAPQPGLGRWGPTIDLPIVPSAAAIEPTSGRVLMWSSYRNDAFEDSPGGITLTSSWDPSTGIVSDRTSTVTGHDMFCPGISMDGNGQIVVSGGNDAKKTSLYDSSSDSWIPGPDMQVARGYQSSATMSDGRVFTIGGSYSGGVVEKNGEVYSPSSKTWTSLPNAKVNPMLTADKRGLYRSDNHAWLFGWKKGSVFQAGPSTAMNWYYTSGSGDVKSAGKRQSDRGVAPDAMCGNAVMYDAVKGKILTFGGSPDYEDSDATTNAHIITLGEPGTSPNTVFASNGLLFARTFHTSVVLPDGSVFITGGQQRGVPLEDSTPVFTPEIYVPEQDTFYKQNPNSIVRAYHSISLLLPDGRVFNGGGGLCGDCETNHFDAQIFTPNYLYDSNGNLATRPKITRTSTQSVVVGGWITIWTDMSISAASLIRYGTATHTVNTDQRRIGLTLTNNGGNSYSFQVPSDSGVALPGYWMLFVMNSAGVPSVASTINVTQGQTGHHHHHH

SEQ ID NO: 103 - DNA, 1953 bp, Artificial Sequence
  Engineered variant of Galactose Oxidase from Fusarium graminearum
atggcatcagcaccgatcgggagcgccatcccgcgcaacaactgggccgttacatgcgattccgcccagagtgggaatgaatgcattaaggcaattgacggtaataaagacacgttttggcacactcaatatggtgtaaacggagatcccaaaccgccgcacaccatcacgatcgatatgaaaacagtacaaaacgtgaatggcctttctgtactgccacgtcaggatggcaatcagaatggatggatcggacgtcacgaggtgtatttaagttctgatggggtgaattggggatcgcctgtagcgtctgggtcctggtttgccgattccaccacaaagtactctaattttgagacacgtccggcccgttacgtgcgccttgtcgccattaccgaagccaatgggcaaccgtggacttcaattgccgagattaacgtatttcaggcgtctagttacactgccccgcagccgggcttggggcgctggggcccgacaatcgatcttcccattgtgccagcggccgccgcaatcgagccaacgagcggtcgtgtcttgatgtggagctcttatcgtaacgatgcgtttcgcgactctcctggcggtattacactgacgagctcatgggaccctagcactggaattgtatccgatcgcacgagtaccgttaccaagcacgacatgttttgccccggtatctcgatggacgggaacggtcagatcgtggtcagcggtggtaatgatgcaaagaaaacttccttatatgattcgagctcggactcttggattccgggcccggatatgcaggtcgcgcgtgggtataactcaagtgcgactatgagtgatgggcgcgtatttacgattggcggcagttttagtggcggtgtgtttgagaagaacggggaggtttactccccgagctcgaagacttggacttcgctgccgaatgcaaaagttaaccccatgctgaccgccgataaacggggtctgtaccgtagcgataatcatgcttggctgtttgggtggaaaaagggtagcgtcttccaagcaggtccaagtactgccatgaactggtattatacatctgggtcgggggacgttaagagtgcagggaagcgtcaatcagaccgcggagtagccccagacgccatgtgcggtaatgccgtaatgtacgacgcagtcaaaggcaaaattttgactttcgggggctcgcccgattatgaggactcagatgcgactacaaatgcccatattatcacgctgggcgagcctggcacgagtccgaatacggtatttgcgagtaatgggttactgttcgctcgtacctttcatacctcggtggtccttccggacgggagtgtattcatcacaggaggccagcagcgcggagttccactggaagatagcacacccgtatttactccagagatctacgttcccgaacaagatactttttacaaacaaaacccgaatagtatcgttcgtgcctatcattcgatcagcttgttgctgccggacggacgtgttttcaatggtggcggtggcttatgcggcgattgtgagacgaaccactttgatgcgcaaatctttacgccgaattatctttacgatagcaacgggaacttagccactcgccctaaaatcacccgtacctcaacccagtcagtcgtggtcggcgggtggatcaccatttggactgacatgtcgatctcggccgcaagtttaattcgctacggaactgctactcacacggtgaacaccgatcagcgacgcatcggcttgacgttaacgaacaacggaggtaattcgtacagctttcaagttccgtcggacagcggggttgctcttccgggatactggatgttgttcgttatgaattccgctggtgtaccctccgttgcgtcgacgattaacgttacccagggccaaactggccaccatcaccatcaccattag

SEQ ID NO: 104 - protein, 650 aa, Artificial Sequence
  Engineered variant of Galactose Oxidase from Fusarium graminearum
MASAPIGSAIPRNNWAVTCDSAQSGNECIKAIDGNKDTFWHTQYGVNGDPKPPHTITIDMKTVQNVNGLSVLPRQDGNQNGWIGRHEVYLSSDGVNWGSPVASGSWFADSTTKYSNFETRPARYVRLVAITEANGQPWTSIAEINVFQASSYTAPQPGLGRWGPTIDLPIVPAAAAIEPTSGRVLMWSSYRNDAFRDSPGGITLTSSWDPSTGIVSDRTSTVTKHDMFCPGISMDGNGQIVVSGGNDAKKTSLYDSSSDSWIPGPDMQVARGYNSSATMSDGRVFTIGGSFSGGVFEKNGEVYSPSSKTWTSLPNAKVNPMLTADKRGLYRSDNHAWLFGWKKGSVFQAGPSTAMNWYYTSGSGDVKSAGKRQSDRGVAPDAMCGNAVMYDAVKGKILTFGGSPDYEDSDATTNAHIITLGEPGTSPNTVFASNGLLFARTFHTSVVLPDGSVFITGGQQRGVPLEDSTPVFTPEIYVPEQDTFYKQNPNSIVRAYHSISLLLPDGRVFNGGGGLCGDCETNHFDAQIFTPNYLYDSNGNLATRPKITRTSTQSVVVGGWITIWTDMSISAASLIRYGTATHTVNTDQRRIGLTLTNNGGNSYSFQVPSDSGVALPGYWMLFVMNSAGVPSVASTINVTQGQTGHHHHHH

SEQ ID NO: 105 - DNA, 1953 bp, Artificial Sequence
  Engineered variant of Galactose Oxidase from Fusarium graminearum
atggcatcagcaccgatcggggtagccatcccgcgcaacaactgggccgttacatgcgattccgcccagagtgggaatgaatgcattaaggcaattgacggtaataaagacacgttttggcacactcaatatggtgtaaacggagatcccaaaccgccgcacaccatcacgatcgatatgaaaacagtacaaaacgtgaatggcctttctgtactgccacgtcaggatggcaatcagaatggatggatcggacgtcacgaggtgtatttaagttctgatggggtgaattggggatcgcctgtagcgtctgggtcctggtttgccgattccaccacaaagtactctaattttgagacacgtccggcccgttacgtgcgccttgtcgccattaccgaagccaatgggcaaccgtggacttcaattgccgagattaacgtatttcaggcgtctagttacactgccccgcagccgggcttggggcgctggggcccgacaatcgatcttcccattgtgccatcggccgccgcaatcgagccaacgagcggtcgtgtcttgatgtggagctcttatcgtcaggatgcgtttcgtgactctcctggcggtattacactgacgagctcatgggaccctagcactggaattgtatccgatcgcactagtaccgttaccgggcacgacatgttttgccccggtatctcgatggacgggaacggtcagatcgtggtcagcggtggtaatgatgcaaagaaaacttccttatatgattcgagctcggactcttggattccgggcccggatatgcaggtcgcgcgtgggtataactcaagtgcgactatgagtgatgggcgcgtatttacgattggcggcagttatagtggcggtcaagttgagaagaacggggaggtttactccccgagctcgaagacttggacttcgctgccgaatgcaaaagttaaccccatgctgaccgccgataaacggggtctgtaccgtagcgataatcatgcttggctgtttgggtggaaaaagggtagcgtcttccaagcaggtccaagtactgccatgaactggtattatacatctgggtcgggggacgttaagagtgcagggaagcgtcaatcagaccgcggagtagccccagacgccatgtgcggtaatgccgtaatgtacgacgcagtcaaaggcaaaattttgactttcgggggctcgcccgattatgaggactcagatgcgactacaaatgcccatattatcacgctgggcgagcctggcacgagtccgaatacggtatttgcgagtaatgggttactggctgctcgtacctttcatacctcggtggtccttccggacgggagtgtattcatcacaggaggccagcagcgcggagttccactggaagatagcacacccgtatttactccagagatctacgttcccgaacaagatactttttacaaacaaaacccgaatagtatcgttcgtgcctatcattcgatcagcttgttgctgccggacggacgtgttttcaatggtggcggtggcttatgcggcgattgtgagacgaaccactttgatgcgcaaatctttacgccgaattatctttacgatagcaacgggaacttagccactcgccctaaaatcacccgtacctcaacccagtcagtcgtggtcggcgggtggatcaccatttggactgacatgtcgatctcggccgcaagtttaattcgctacggaactgctactcacacggtgaacaccgatcagcgacgcatcggcttgacgttaacgaacaacggaggtaattcgtacagctttcaagttccgtcggacagcggggttgctcttccgggatactggatgttgttcgttatgaattccgctggtgtaccctccgttgcgtcgacgattaacgttacccagggccaaactggccaccatcaccatcaccattag

SEQ ID NO: 106 - protein, 650 aa, Artificial Sequence
  Engineered variant of Galactose Oxidase from Fusarium graminearum
MASAPIGVAIPRNNWAVTCDSAQSGNECIKAIDGNKDTFWHTQYGVNGDPKPPHTITIDMKTVQNVNGLSVLPRQDGNQNGWIGRHEVYLSSDGVNWGSPVASGSWFADSTTKYSNFETRPARYVRLVAITEANGQPWTSIAEINVFQASSYTAPQPGLGRWGPTIDLPIVPSAAAIEPTSGRVLMWSSYRQDAFRDSPGGITLTSSWDPSTGIVSDRTSTVTGHDMFCPGISMDGNGQIVVSGGNDAKKTSLYDSSSDSWIPGPDMQVARGYNSSATMSDGRVFTIGGSYSGGQVEKNGEVYSPSSKTWTSLPNAKVNPMLTADKRGLYRSDNHAWLFGWKKGSVFQAGPSTAMNWYYTSGSGDVKSAGKRQSDRGVAPDAMCGNAVMYDAVKGKILTFGGSPDYEDSDATTNAHIITLGEPGTSPNTVFASNGLLAARTFHTSVVLPDGSVFITGGQQRGVPLEDSTPVFTPEIYVPEQDTFYKQNPNSIVRAYHSISLLLPDGRVFNGGGGLCGDCETNHFDAQIFTPNYLYDSNGNLATRPKITRTSTQSVVVGGWITIWTDMSISAASLIRYGTATHTVNTDQRRIGLTLTNNGGNSYSFQVPSDSGVALPGYWMLFVMNSAGVPSVASTINVTQGQTGHHHHHH

SEQ ID NO: 107 - DNA, 1953 bp, Artificial Sequence
  Engineered variant of Galactose Oxidase from Fusarium graminearum
atggcatcagcaccgatcggggtagccatcccgcgcaacaactgggccgttacatgcgattccgcccagagtgggaatgaatgcattaaggcaattgacggtaataaagacacgttttggcacactcaatatggtgtaaacggagatcccaaaccgccgcacaccatcacgatcgatatgaaaacagtacaaaacgtgaatggcctttctgtactgccacgtcaggatggcaatcagaatggatggatcggacgtcacgaggtgtatttaagttctgatggggtgaattggggatcgcctgtagcgtctgggtcctggtttgccgattccaccacaaagtactctaattttgagacacgtccggcccgttacgtgcgccttgtcgccattaccgaagccaatgggcaaccgtggacttcaattgccgagattaacgtatttcaggcgtctagttacactgccccgcagccgggcttggggcgctggggcccgacaatcgatcttcccattgtgccatcggccgccgcaatcgagccaacgagcggtcgtgtcttgatgtggagctcttatcgtcaggatgcgtttcgtgactctcctggcggtattacactgacgagctcatgggaccctagcactggaattgtatccgatcgcactgtgaccgttaccgggcacgacatgttttgccccggtatctcgatggacgggaacggtcagatcgtggtcagcggtggtaatgatgcaaagaaaacttccttatatgattcgagctcggactcttggattccgggcccggatatgcaggtcgcgcgtgggtataactcaagtgcgactatgagtgatgggcgcgtatttacgattggcggcagttatagtggcggtcaagttgagaagaacggggaggtttactccccgagctcgaagacttggacttcgctgccgaatgcaaaagttaaccccatgctgaccgccgataaacgtggtctgtaccgtagcgataatcatgcttggctgtttgggtggaaaaagggtagcgtcttccaagcaggtccaagtactgccatgaactggtattatacatctgggtcgggggacgttaagagtgcagggaagcgtcaatcaaatcgcggagtagccccagacgccatgtgcggtaatgccgtaatgtacgacgcagtcaaaggcaaaattttgactttcgggggctcgcccgattatgaggactcagatgcgactacaaatgcccatattatcacgctgggcgagcctggcacgctgccgaatacggtatttgcgagtaatgggttactgttcgctcgtacctttcatacctcggtggtccttccggacgggagtgtgttcatcacaggaggccagcagcgcggagttccactggaagatagcacacccgtatttactccagagatctacgttcccgaacaagatactttttacaaacaaaacccgaatagtatcgttcgtgcctatcattcgatcagcttgttgctgccggacggacgtgttttcaatggtggcggtggcttatgcggcgattgtgagacgaaccactttgatgcgcaaatctttacgccgaattatctttacgatagcaacgggaacttagccactcgccctaaaatcacccgtacctcaacccagtcagtcgtggtcggcgggtggatcaccatttggactgacatgtcgatctcggccgcaagtttaattcgctacggaactgctactcacacggtgaacaccgatcagcgacgcatcggcttgacgttaacgaacaacggaggtaattcgtacagctttcaagttccgtcggacagcggggttgctcttccgggatactggatgttgttcgttatgaattccgctggtgtaccctccgttgcgtcgacgattaacgttacccagggccaaactggccaccatcaccatcaccattag

SEQ ID NO: 108 - protein, 650 aa, Artificial Sequence
  Engineered variant of Galactose Oxidase from Fusarium graminearum
MASAPIGVAIPRNNWAVTCDSAQSGNECIKAIDGNKDTFWHTQYGVNGDPKPPHTITIDMKTVQNVNGLSVLPRQDGNQNGWIGRHEVYLSSDGVNWGSPVASGSWFADSTTKYSNFETRPARYVRLVAITEANGQPWTSIAEINVFQASSYTAPQPGLGRWGPTIDLPIVPSAAAIEPTSGRVLMWSSYRQDAFRDSPGGITLTSSWDPSTGIVSDRTVTVTGHDMFCPGISMDGNGQIVVSGGNDAKKTSLYDSSSDSWIPGPDMQVARGYNSSATMSDGRVFTIGGSYSGGQVEKNGEVYSPSSKTWTSLPNAKVNPMLTADKRGLYRSDNHAWLFGWKKGSVFQAGPSTAMNWYYTSGSGDVKSAGKRQSNRGVAPDAMCGNAVMYDAVKGKILTFGGSPDYEDSDATTNAHIITLGEPGTLPNTVFASNGLLFARTFHTSVVLPDGSVFITGGQQRGVPLEDSTPVFTPEIYVPEQDTFYKQNPNSIVRAYHSISLLLPDGRVFNGGGGLCGDCETNHFDAQIFTPNYLYDSNGNLATRPKITRTSTQSVVVGGWITIWTDMSISAASLIRYGTATHTVNTDQRRIGLTLTNNGGNSYSFQVPSDSGVALPGYWMLFVMNSAGVPSVASTINVTQGQTGHHHHHH

SEQ ID NO: 109 - DNA, 1953 bp, Artificial Sequence
  Engineered variant of Galactose Oxidase from Fusarium graminearum
atggcatcagcaccgatcggggtagccatcccgcgcaacaactgggccgttacatgcgattccgcccagagtgggaatgaatgcattaaggcaattgacggtaataaagacacgttttggcacactcaatatggtgtaaacggagatcccaaaccgccgcacaccatcacgatcgatatgaaaacagtacaaaacgtgaatggcctttctgtactgccacgtcaggatggcaatcagaatggatggatcggacgtcacgaggtgtatttaagttctgatggggtgaattggggatcgcctgtagcgtctgggtcctggtttgccgattccaccacaaagtactctaattttgagacacgtccggcccgttacgtgcgccttgtcgccatcaccgaagccaatgggcaaccgtggacttcaattgccgagattaacgtatttcaggcgtctagttacactgccccgcagccgggcttggggcgctggggcccgacaatcgatcttcccattgtgccatcggccgccgcaatcgagccaacgagcggtcgtgtcttgatgtggagctcttatcgtcaggatgcgtttcgtgactctcctggcggtattacactgacgagctcatgggaccctagcactggaattgtatccgatcgtactagtaccgttaccgggcacgacatgttttgccccggtatctcgatggacgggaacggtcagatcgtggtcagcggtggtaatgatgcaaagaaaacttccttatatgattcgagctcggactcttggattccgggcccggatatgcaggtcgcgcgtgggtataactcaagtgcgactatgagtgatgggcgcgtatttacgattggcggcagtttcagtggcggtcaagttgagaagaacggggaggtttactccccgagctcgaagacttggacttcgctgccgaatgcaaaagttaaccccatgctgaccgccgataaacggggtctgtaccgtagcgataatcatgcttggctgtttgggtggaaaaagggtagcgtcttccaagcaggtccaagtactgccatgaactggtattatacatctgggtcgggggacgttaagagtgcagggaagcgtcaatcagaccgcggagtagccccagacgccatgtgcggtaatgccgtaatgtacgacgcagtcaaaggcaaaattttgactttcgggggctcgcccgattatgaggactcagatgcgactacaaatgcccatattatcacgctgggcgagcctggcacgagtccgaatatcgtatttgcgagtaatgggttactgttcgctcgtacctttcatacctcggtggtccttccggacgggagtgtattcatcacaggaggccagcagcgcggagttccactggaagatagcacacccgtatttactccagagatctacgttcccgaacaagatactttttacaaacaaaacccgaatagtatcgttcgtgcctatcattcgatcagcttgttgctgccggacggacgtgttttcaatggtggcggtggcttatgcggcgattgtgagacgaaccactttgatgcgcaaatctttacgccgaattatctttacgatagcaacgggaacttagccactcgccctaaaatcacccgtacctcaacccagtcagtcgtggtcggcgggtggatcaccatttggactgacatgtcgatctcggccgcaagtttaattcgctacggaactgctactcacacggtgaacaccgatcagcgacgcatcggcttgacgttaacgaacaacggaggtaattcgtacagctttcaagttccgtcggacagcggggttgctcttccgggatactggatgttgttcgttatgaattccgctggtgtaccctccgttgcgtcgacgattaacgttacccagggccaaactggccaccatcaccatcaccattag

SEQ ID NO: 110 - protein, 650 aa, Artificial Sequence
  Engineered variant of Galactose Oxidase from Fusarium graminearum
MASAPIGVAIPRNNWAVTCDSAQSGNECIKAIDGNKDTFWHTQYGVNGDPKPPHTITIDMKTVQNVNGLSVLPRQDGNQNGWIGRHEVYLSSDGVNWGSPVASGSWFADSTTKYSNFETRPARYVRLVAITEANGQPWTSIAEINVFQASSYTAPQPGLGRWGPTIDLPIVPSAAAIEPTSGRVLMWSSYRQDAFRDSPGGITLTSSWDPSTGIVSDRTSTVTGHDMFCPGISMDGNGQIVVSGGNDAKKTSLYDSSSDSWIPGPDMQVARGYNSSATMSDGRVFTIGGSFSGGQVEKNGEVYSPSSKTWTSLPNAKVNPMLTADKRGLYRSDNHAWLFGWKKGSVFQAGPSTAMNWYYTSGSGDVKSAGKRQSDRGVAPDAMCGNAVMYDAVKGKILTFGGSPDYEDSDATTNAHIITLGEPGTSPNIVFASNGLLFARTFHTSVVLPDGSVFITGGQQRGVPLEDSTPVFTPEIYVPEQDTFYKQNPNSIVRAYHSISLLLPDGRVFNGGGGLCGDCETNHFDAQIFTPNYLYDSNGNLATRPKITRTSTQSVVVGGWITIWTDMSISAASLIRYGTATHTVNTDQRRIGLTLTNNGGNSYSFQVPSDSGVALPGYWMLFVMNSAGVPSVASTINVTQGQTGHHHHHH

SEQ ID NO: 111 - DNA, 1953 bp, Artificial Sequence
  Engineered variant of Galactose Oxidase from Fusarium graminearum
atggcatcagcaccgatcggggtagccatcccgcgcaacaactgggccgttacatgcgattccgcccagagtgggaatgaatgcattaaggcaattgacggtaataaagacacgttttggcacactcaatatggtgtgaacggagatcccaaaccgccgcacaccatcacgatcgatatgaaaacagtacaaaacgtgaatggcctttctgtactgccacgtcaggatggcaatcagaatggatggatcggacgtcacgaggtgtatttaagttctgatggggtgaattggggatcgcctgtagcgtctgggtcctggtttgccgattccaccacaaagtactctaattttgagacacgtccggcccgttacgtgcgccttgtcgccattaccgaagccaatgggcaaccgtggacttcaattgccgagattaacgtatttcaggcgtctagttacactgccccgcagccggagttggggcgctggggcccgacaatcgatcttcccattgtgccatcggccgccgcaatcgagccaacgagcggtcgtgtcttgatgtggagctcttatcgtaacgatgcgtttcgtgactctcctggcggtattacactgacgagctcatgggaccctagcactggaattgtatccgatcgcactagtaccgttaccgggcacgacatgttttgccccggtatctcgatggacgggaacggtcagatcgtggtcagcggtggtaatgatgcaaagaaaacttccttatatgattcgagctcggactcttggattccgggcccggatatgcaggtcgcgcgtgggtataactcaagtgcgactatgagtgatgggcgcgtatttacgattggcggcagttttagtggcggtcaagttgagaagaacggggaggtttactccccgagctcgaagacttggacttcgctgccgaatgcaaaagttaaccccatgctgaccgccgataaacggggtctgtaccgtagcgataatcatgcttggctgtttgggtggaaaaagggtagcgtcttccaagcaggtccaagtactgccatgaactggtattatacatctgggtcgggggacgttaagagtgcagggaagcgtcaatcagaccgcggagtagccccagacgccatgtgcggtaatgccgtaatgtacgacgcagtcaaaggcaaaattttgactttcgggggctcgcccgattatgagaattcagatgcgactacaaatgcccatattatcacgctgggcgagcctggcacgagtccgaatacggtatttgcgagtaatgggttactgttcgctcgtacctttcatacctcggtggtccttccggacgggagtgtattcatcacaggaggccagcagcgcgcggttccactggaagatagcacacccgtatttactccagagatctacgttcccgaacaagatactttttacaagcaaaacccgaatagtatcgttcgtgcctatcattcgatcagcttgttgctgccggacggacgtgttttcaatggtggcggtggcttatgcggcgattgtgagacgaaccactttgatgcgcaaatctttacgccgaattatctttacgatagcaacgggaacttagccactcgccctaaaatcacccgtacctcaacccagtcagtcaaggtcggcgggtggatcaccatttggactgacatgtcgatctcggccgcaagtttaattcgctacggaactgctactcacacggtgaacaccgatcagcgacgcatcggcttgacgttaacgaacaacggaggtaattcgtacagctttcaagttccgtcggacagcggggttgctcttccgggatactggatgttgttcgttatgaattccgctggtgtaccctccgttgcgtcgacgattaacgttacccagggccaaactggccaccatcaccatcaccattag

SEQ ID NO: 112 - protein, 650 aa, Artificial Sequence
  Engineered variant of Galactose Oxidase from Fusarium graminearum
MASAPIGVAIPRNNWAVTCDSAQSGNECIKAIDGNKDTFWHTQYGVNGDPKPPHTITIDMKTVQNVNGLSVLPRQDGNQNGWIGRHEVYLSSDGVNWGSPVASGSWFADSTTKYSNFETRPARYVRLVAITEANGQPWTSIAEINVFQASSYTAPQPELGRWGPTIDLPIVPSAAAIEPTSGRVLMWSSYRNDAFRDSPGGITLTSSWDPSTGIVSDRTSTVTGHDMFCPGISMDGNGQIVVSGGNDAKKTSLYDSSSDSWIPGPDMQVARGYNSSATMSDGRVFTIGGSFSGGQVEKNGEVYSPSSKTWTSLPNAKVNPMLTADKRGLYRSDNHAWLFGWKKGSVFQAGPSTAMNWYYTSGSGDVKSAGKRQSDRGVAPDAMCGNAVMYDAVKGKILTFGGSPDYENSDATTNAHIITLGEPGTSPNTVFASNGLLFARTFHTSVVLPDGSVFITGGQQRAVPLEDSTPVFTPEIYVPEQDTFYKQNPNSIVRAYHSISLLLPDGRVFNGGGGLCGDCETNHFDAQIFTPNYLYDSNGNLATRPKITRTSTQSVKVGGWITIWTDMSISAASLIRYGTATHTVNTDQRRIGLTLTNNGGNSYSFQVPSDSGVALPGYWMLFVMNSAGVPSVASTINVTQGQTGHHHHHH

SEQ ID NO: 113 - DNA, 1953 bp, Artificial Sequence
  Engineered variant of Galactose Oxidase from Fusarium graminearum
atggcatcagcaccgatcggggtagccatcccgcgcaacaactgggccgttacatgcgattccgcccagagtgggaatgaatgcattaaggcaattgacggtaataaagacacgttttggcacactcaatatggtgtgaacggagatcccaaaccgccgcacaccatcacgatcgatatgaaaacagtacaaaacgtgaatggcctttctgtactgccacgtcaggatggcaatcagaatggatggatcggacgtcacgaggtgtatttaagttctgatggggtgaattggggatcgcctgtagcgtctgggtcctggtttgccgattccaccacaaagtactctaattttgagacacgtccggcccgttacgtgcgccttgtcgccattaccgaagccaatgggcaaccgtggacttcaattgccgagattaacgtatttcaggcgtctagttacactgccccgcagccggagttggggcgctggggcccgacaatcgatcttcccattgtgccatcggccgccgcaatcgagccaacgagcggtcgtgtcttgatgtggagctcttatcgtaacgatgcgtttcgtgactctcctggcggtattacactgacgagctcatgggaccctagcactggaattgtatccgatcgcactagtaccgttaccgggcacgacatgttttgccccggtatctcgatggacgggaacggtcagatcgtggtcagcggtggtaatgatgcaaagaaaacttccttatatgattcgagctcggactcttggattccgggcccggatatgcaggtcgcgcgtgggtatcaatcaagtgcgactatgagtgatgggcgcgtatttacgattggcggcagttttagtggcggtcaagttgagaagaacggggaggtttactccccgagctcgaagacttggacttcgctgccgaatgcaaaagttaaccccatgctgaccgccgataaacggggtctgtaccgtagcgataatcatgcttggctgtttgggtggaaaaagggtagcgtcttccaagcaggtccaagtactgccatgaactggtattatacatctgggtcgggggacgttaagagtgcagggaagcgtcaatcagaccgcggagtagccccagacgccatgtgcggtaatgccgtaatgtacgacgcagtcaaaggcaaaattttgactttcgggggctcgcccgattatgaggactcagatgcgactacaaatgcccatattatcacgctgggcgagcctggcacgagtccgaatacggtatttgcgagtaatgggttaaatttcgctcgtacctttcatacctcggtggtccttccggacgggagtgtattcatcacaggaggccagcagcgcgcggttccactggaagatagcacacccgtatttactccagagatctacgttcccgaacaagatactttttacaagcaaaacccgaatagtatcgttcgtgcctatcattcgatcagcttgttgctgccggacggacgtgttttcaatggtggcggtggcttatgcggcgattgtgagacgaaccactttgatgcgcaaatctttacgccgaattatctttacgatagcaacgggaacttagccactcgccctaaaatcacccgtacctcaacccagtcagtcaaggtcggcgggtggatcaccatttggactgacatgtcgatctcggccgcaagtttaattcgctacggaactgctactcacacggtgaacaccgatcagcgacgcatcggcttgacgttaacgaacaacggaggtaattcgtacagctttcaagttccgtcggacagcggggttgctcttccgggatactggatgttgttcgttatgaattccgctggtgtaccctccgttgcgtcgacgattaatgttacccagggccaaactggccaccatcaccatcaccattag

SEQ ID NO: 114 - protein, 650 aa, Artificial Sequence
  Engineered variant of Galactose Oxidase from Fusarium graminearum
MASAPIGVAIPRNNWAVTCDSAQSGNECIKAIDGNKDTFWHTQYGVNGDPKPPHTITIDMKTVQNVNGLSVLPRQDGNQNGWIGRHEVYLSSDGVNWGSPVASGSWFADSTTKYSNFETRPARYVRLVAITEANGQPWTSIAEINVFQASSYTAPQPELGRWGPTIDLPIVPSAAAIEPTSGRVLMWSSYRNDAFRDSPGGITLTSSWDPSTGIVSDRTSTVTGHDMFCPGISMDGNGQIVVSGGNDAKKTSLYDSSSDSWIPGPDMQVARGYQSSATMSDGRVFTIGGSFSGGQVEKNGEVYSPSSKTWTSLPNAKVNPMLTADKRGLYRSDNHAWLFGWKKGSVFQAGPSTAMNWYYTSGSGDVKSAGKRQSDRGVAPDAMCGNAVMYDAVKGKILTFGGSPDYEDSDATTNAHIITLGEPGTSPNTVFASNGLNFARTFHTSVVLPDGSVFITGGQQRAVPLEDSTPVFTPEIYVPEQDTFYKQNPNSIVRAYHSISLLLPDGRVFNGGGGLCGDCETNHFDAQIFTPNYLYDSNGNLATRPKITRTSTQSVKVGGWITIWTDMSISAASLIRYGTATHTVNTDQRRIGLTLTNNGGNSYSFQVPSDSGVALPGYWMLFVMNSAGVPSVASTINVTQGQTGHHHHHH

SEQ ID NO: 115 - DNA, 1953 bp, Artificial Sequence
  Engineered variant of Galactose Oxidase from Fusarium graminearum
atggcatcagcaccgatcggggtagccatcccgcgcaacaactgggccgttacatgcgattccgcccagagtgggaatgaatgcattaaggcaattgacggtaataaagacacgttttggcacactcaatatggtactaacggagatcccaaaccgccgcacaccatcacgatcgatatgaaaacagtacaaaacgtgaatggcctttctgtactgccacgtcaggatggcaatcagaatggatggatcggacgtcacgaggtgtatttaagttctgatggggtgaattggggatcgcctgtagcgtctgggtcctggtttgccgattccaccacaaagtactctaattttgagacacgtccggcccgttacgtgcgccttgtcgccattaccgaagccaatgggcaaccgtggacttcaattgccgagattaacgtatttcaggcgtctagttacactgccccgcagccgggcttggggcgctggggcccgacaatcgatcttcccattgtgccatcggccgccgcaatcgagccaacgagcggtcgtgtcttgatgtggagctcttatcgtaacgatgcgtttcgtgactctcctggcggtattacactgacgagctcatgggaccctagcactggaattgtatccgatcgcactagtaccgttaccgggcacgacatgttttgccccggtatctcgatggatgggaacggtcagatcgtggtcagcggtggtaatgatgcaaagaaaacttccttatatgattcgagctcggactcttggattccgggcccggatatgcaggtcgcgcgtgggtataattcaagtgcgactatgagtgatgggcgcgtatttacgattggcggcagttttagtggcggtcaagttgagaagaacggggaggtttactccccgagctcgaagacttggacttcgctgccgaatgcaaaagttaaccccatgctgaccgccgataaacggggtctgtaccgtagcgataatcatgcttggctgtttgggtggaaaaagggtagcgtcttccaagcaggtccaagtactgccatgaactggtattatacatctgggtcgggggacgttaagagtgcagggaagcgtcaatcagaccgcggagtagccccagacgccatgtgcggtaatgccgtaatgtacgacgcagtcaaaggcaaaattttgactttcgggggctcgcccgattatgaggactcagatgcgactacaaatgcccatattatcacgctgggcgagcctggcacgagtccgaatacggtatttgcgagtaatgggttactgttcgctcgtacctttcatacctcggtggtccttccggacgggagtgtattcatcacaggaggccagcagcgcgcggttccactggaagatagcacacccgtatttactccagagatctacgttcccgaacaagatactttttacaagcaaaacccgaatagtatcgttcgtgcctatcattcgatcagcttgttgctgccggacggacgtgttttcaatggtggcggtggcttatgcggcgattgtgagacgaaccactttgatgcgcaaatctttacgccgaattatctttacgatagcaacgggaacttagccactcgccctaaaatcacccgtacctcaacccagtcagtcgtcgtcggcgggtggatcaccatttggactgacatgtcgatctcggccgcaagtttaattcgctacggaactgctactcacacggtgaacaccgatcagcgacgcatcggcttgacgttaacgaacaacggaggtaattcgtacagctttcaagttccgtcggacagcggggttgctcttccgggatactggatgttgttcgttatgaattccgctggtgtaccctccgttgcgtcgacgattaacgttacccagggccaaactggccaccatcaccatcaccattag

SEQ ID NO: 116 - protein, 650 aa, Artificial Sequence
  Engineered variant of Galactose Oxidase from Fusarium graminearum
MASAPIGVAIPRNNWAVTCDSAQSGNECIKAIDGNKDTFWHTQYGTNGDPKPPHTITIDMKTVQNVNGLSVLPRQDGNQNGWIGRHEVYLSSDGVNWGSPVASGSWFADSTTKYSNFETRPARYVRLVAITEANGQPWTSIAEINVFQASSYTAPQPGLGRWGPTIDLPIVPSAAAIEPTSGRVLMWSSYRNDAFRDSPGGITLTSSWDPSTGIVSDRTSTVTGHDMFCPGISMDGNGQIVVSGGNDAKKTSLYDSSSDSWIPGPDMQVARGYNSSATMSDGRVFTIGGSFSGGQVEKNGEVYSPSSKTWTSLPNAKVNPMLTADKRGLYRSDNHAWLFGWKKGSVFQAGPSTAMNWYYTSGSGDVKSAGKRQSDRGVAPDAMCGNAVMYDAVKGKILTFGGSPDYEDSDATTNAHIITLGEPGTSPNTVFASNGLLFARTFHTSVVLPDGSVFITGGQQRAVPLEDSTPVFTPEIYVPEQDTFYKQNPNSIVRAYHSISLLLPDGRVFNGGGGLCGDCETNHFDAQIFTPNYLYDSNGNLATRPKITRTSTQSVVVGGWITIWTDMSISAASLIRYGTATHTVNTDQRRIGLTLTNNGGNSYSFQVPSDSGVALPGYWMLFVMNSAGVPSVASTINVTQGQTGHHHHHH

SEQ ID NO: 117 - DNA, 1953 bp, Artificial Sequence
  Engineered variant of Galactose Oxidase from Fusarium graminearum
atggcatcagcaccgatcggggtagccatcccgcgcaacaactgggccgttacatgcgattccgcccagagtgggaatgaatgcattaaggcaattgacggtaataaagacacgttttggcacactcaatatggtgtaaacggagatcccaaaccgccgcacaccatcacgatcgatatgaaaacagtacaaaacgtgaatggcctttctgtactgccacgtcaggatggcaatcagaatggatggatcggacgtcacgaggtgtatttaagttctgatggggtgaattggggatcgcctgtagcgtctgggtcctggtttgccgattccaccacaaagtactctaattttgagacacgtccggcccgttacgtgcgccttgtcgccattaccgaagccaatgggcaaccgtggacttcaattgccgagattaacgtatttcaggcgtctagttacactgccccgcagccggagttggggcgctggggcccgacaatcgatcttcccattgtgccatcggccgccgcaatcgagccaacgagcggtcgtgtcttgatgtggagctcttatcgtaacgatgcgtttcgtgactctcctggcggtattacactgacgagctcatgggaccctagcactggaattgtatccgaacgcactagtaccgttaccgggcacgacatgttttgccccggtatctcgatggacgggaacggtcagatcgtggtcagcggtggtaatgatgcaaagaaaacttccttatatgattcgagctcggactcttggattccgggcccggatatgcaggtcgcgcgtgggtataattcaagtgcgactatgagtgatgggcgcgtatttacgattggcggcagttttagtggcggtcaagttgagaagaacggggaggtttactcgccgagctcgaagacttggacttcgctgccgaatgcaaaagttaaccccatgctgaccgccgataaacggggtctgtaccgtagcgataatcatgcttggctgtttgggtggaaaaagggtagcgtcttccaagcaggtccaagtactgccatgaactggtattatacatctgggtcgggggacgttaagagtgcagggaagcgtcaatcagaccgcggagtagccccagacgccatgtgcggtaatgccgtaatgtacgacgcagtcaaaggcaaaattttgactttcgggggctcgcccgattatgaggactcagatgcgactacaaatgcccatattatcacgctgggcgagcctggcacgagtccgaatacggtatttgcgagtaatgggttactgttcgctcgtacctttcatacctcggtggtccttccggacgggagtgtattcatcacaggaggccagcagcgcgcggttccactggaagatagcacacccgtatttactccagagatctacgttcccgaacaagatactttttacaagcaaaacccgaatagtatcgttcgtgcctatcattcgatcagcttgttgctgccggacggacgtgttttcaatggtggcggtggcttatgcggcgattgtgagacgaaccactttgatgcgcaaatctttacgccgaattatctttacgatagcaacgggaacttagccactcgccctaaaatcacccgtacctcaacccagtcagtcaaggtcggcgggtggatcaccatttggactgacatgtcgatctcggccgcaagtttaattcgctacggaactgctactcacacggtgaacaccgatcagcgacgcatcggcttgacgttaacgaacaacggaggtaattcgtacagctttcaagttccgtcggacagcggggttgctcttccgggatactggatgttgttcgttatgaattccgctggtgtaccctccgttgcgtcgacgattaacgttacccagggccaaactggccaccatcaccatcaccattag

SEQ ID NO: 118 - protein, 650 aa, Artificial Sequence
  Engineered variant of Galactose Oxidase from Fusarium graminearum
MASAPIGVAIPRNNWAVTCDSAQSGNECIKAIDGNKDTFWHTQYGVNGDPKPPHTITIDMKTVQNVNGLSVLPRQDGNQNGWIGRHEVYLSSDGVNWGSPVASGSWFADSTTKYSNFETRPARYVRLVAITEANGQPWTSIAEINVFQASSYTAPQPELGRWGPTIDLPIVPSAAAIEPTSGRVLMWSSYRNDAFRDSPGGITLTSSWDPSTGIVSERTSTVTGHDMFCPGISMDGNGQIVVSGGNDAKKTSLYDSSSDSWIPGPDMQVARGYNSSATMSDGRVFTIGGSFSGGQVEKNGEVYSPSSKTWTSLPNAKVNPMLTADKRGLYRSDNHAWLFGWKKGSVFQAGPSTAMNWYYTSGSGDVKSAGKRQSDRGVAPDAMCGNAVMYDAVKGKILTFGGSPDYEDSDATTNAHIITLGEPGTSPNTVFASNGLLFARTFHTSVVLPDGSVFITGGQQRAVPLEDSTPVFTPEIYVPEQDTFYKQNPNSIVRAYHSISLLLPDGRVFNGGGGLCGDCETNHFDAQIFTPNYLYDSNGNLATRPKITRTSTQSVKVGGWITIWTDMSISAASLIRYGTATHTVNTDQRRIGLTLTNNGGNSYSFQVPSDSGVALPGYWMLFVMNSAGVPSVASTINVTQGQTGHHHHHH

SEQ ID NO: 119 - DNA, 1953 bp, Artificial Sequence
  Engineered variant of Galactose Oxidase from Fusarium graminearum
atggcatcagcaccgatcggggtagccatcccgcgcaacaactgggccgttacatgcgattccgcccagagtgggaatgaatgcattaaggcaattgacggtaataaagacacgttttggcacactcaatatggtactaacggagatcccaaaccgccgcacaccatcacgatcgatatgaaaacagtacaaaacgtgaatggcctttctgtactgccacgtcaggatggcaatcagaatggatggatcggacgtcacgaggtgtatttaagttctgatggggtgaattggggatcgcctgtagcgtctgggtcctggtttgccgattccaccacaaagtactctaattttgagacacgtccggcccgttacgtgcgccttgtcgccattaccgaagccaatgggcaaccgtggacttcaattgccgagattaacgtatttcaggcgtctagttacactgccccgcagccgggcttggggcgctggggcccgacaatcgatcttcccattgtgccatcggccgccgcaatcgagccaacgagcggtcgtgtcttgatgtggagctcttatcgtaacgatgcgtttcgtgactctcctggcggtattacactgacgagctcatgggaccctagcactggaattgtatccgatcgcactagtaccgttaccgggcacgacatgttttgccccggtatctcgatggacgggaacggtcagatcgtggtcagcggtggtaatgatgcaaagaaaacttccttatatgattcgagctcggactcttggattccgggcccggatatgcaggtcgcgcgtgggtataactcaagtgcgactatgagtgatgggcgcgtatttacgattggcggcagttttagtggcggtcaagttgagaagaacggggaggtttactcgccgagctcgaagacttggacttcgctgccgaatgcaaaagttaaccccatgctgaccgccgataaacggggtctgtaccgtagcgataatcatgcttggctgtttgggtggaaaaagggtagcgtcttccaagcaggtccaagtactgccatgaactggtattatacatctgggtcgggggacgttaagagtgcagggaagcgtcaatcaaaccgcggagtagccccagacgccatgtgcggtaatgccgtaatgtacgacgcagtcaaaggcaaaattttgactttcgggggctcgcccgattatgaggactcagatgcgactacaaatgcccatattatcacgctgggcgagcctggcacgagtccgaatacggtatttgcgagtaatgggttaaatttcgctcgtacctttcatacctcggtggtccttccggacgggagtgtattcatcacaggaggccagcagcgcgcggttccactggaagatagcacacccgtatttactccagagatctacgttcccgaacaagatactttttacaagcaaaacccgaatagtatcgttcgtgcctatcattcgatcagcttgttgctgccggacggacgtgttttcaatggtggcggtggcttatgcggcgattgtgagacgaaccactttgatgcgcaaatctttacgccgaattatctttacgatagcaacgggaacttagccactcgccctaaaatcacccgtacctcaacccagtcagtcgtggtcggcgggtggatcaccatttggactgacatgtcgatctcggccgcaagtttaattcgctacggaactgctactcacacggtgaacaccgatcagcgacgcatcggcttgacgttaacgaacaacggaggtaattcgtacagctttcaagttccgtcggacagcggggttgctcttccgggatactggatgttgttcgttatgaattccgctggtgtaccctccgttgcgtcgacgattaatgttacccagggccaaactggccaccatcaccatcaccattag

SEQ ID NO: 120 - protein, 650 aa, Artificial Sequence
  Engineered variant of Galactose Oxidase from Fusarium graminearum
MASAPIGVAIPRNNWAVTCDSAQSGNECIKAIDGNKDTFWHTQYGTNGDPKPPHTITIDMKTVQNVNGLSVLPRQDGNQNGWIGRHEVYLSSDGVNWGSPVASGSWFADSTTKYSNFETRPARYVRLVAITEANGQPWTSIAEINVFQASSYTAPQPGLGRWGPTIDLPIVPSAAAIEPTSGRVLMWSSYRNDAFRDSPGGITLTSSWDPSTGIVSDRTSTVTGHDMFCPGISMDGNGQIVVSGGNDAKKTSLYDSSSDSWIPGPDMQVARGYNSSATMSDGRVFTIGGSFSGGQVEKNGEVYSPSSKTWTSLPNAKVNPMLTADKRGLYRSDNHAWLFGWKKGSVFQAGPSTAMNWYYTSGSGDVKSAGKRQSNRGVAPDAMCGNAVMYDAVKGKILTFGGSPDYEDSDATTNAHIITLGEPGTSPNTVFASNGLNFARTFHTSVVLPDGSVFITGGQQRAVPLEDSTPVFTPEIYVPEQDTFYKQNPNSIVRAYHSISLLLPDGRVFNGGGGLCGDCETNHFDAQIFTPNYLYDSNGNLATRPKITRTSTQSVVVGGWITIWTDMSISAASLIRYGTATHTVNTDQRRIGLTLTNNGGNSYSFQVPSDSGVALPGYWMLFVMNSAGVPSVASTINVTQGQTGHHHHHH

SEQ ID NO: 121 - DNA, 1953 bp, Artificial Sequence
  Engineered variant of Galactose Oxidase from Fusarium graminearum
atggcatcagcaccgatcggggtagccatcccgcgcaacaactgggccgttacatgcgattccgcccagagtgggaatgaatgcattaaggcaattgacggtaataaagacacgttttggcacactcaatatggtgctaacggagatcccaaaccgccgcacaccatcacgatcgatatgaaaacagtacaaaacgtgaatggcctttctgtactgccacgtcaggatggcaatcagaatggatggatcggacgtcacgaggtgtatttaagttctgatggggtgaattggggatcgcctgtagcgtctgggtcctggtttgccgattccaccacaaagtactctaattttgagacacgtccggcccgttacgtgcgccttgtcgccattaccgaagccaatgggcaaccgtggacttcaattgccgagattaacgtatttcaggcgtctagttacactgccccgcagccggagttggggcgctggggcccgacaatcgatcttcccattgtgccatcggccgccgcaatcgagccaacgagcggtcgtgtcttgatgtggagctcttatcgtaacgatgcgtttcgtgactctcctggcggtattacactgacgagctcatgggaccctagcactggaattgtatccgatcgcactagtaccgttaccgggcacgacatgttttgccccggtatctcgatggacgggaacggtcagatcgtggtcagcggtggtaatgatgcaaagaaaacttccttatatgattcgagctcggactcttggattccgggcccggatatgcaggtcgcgcgtgggtataactcaagtgcgactatgagtgatgggcgcgtatttacgattggcggcagttttagtggcggtcaagttgagaagaacggggaggtttactcgccgagctcgaagacttggacttcgctgccgaatgcaaaagttaaccccatgctgaccgccgataaacggggtctgtaccgtagcgataatcatgcttggctgtttgggtggaaaaagggtagcgtcttccaagcaggtccaagtactgccatgaactggtattatacatctgggtcgggggacgttctgagtgcagggaagcgtcaatcaaaccgcggagtagccccagacgccatgtgcggtaatgccgtaatgtacgacgcagtcaaaggcaaaattttgactttcgggggctcgcccgattatgaggactcagatgcgactacaaatgcccatattatcacgctgggcgagcctggcacgagtccgaatacggtatttgcgagtaatgggttactgttcgctcgtacctttcatacctcggtggtccttccggacgggagtgtattcatcacaggaggccagcagcgcgcggttccactggaagatagcacacccgtatttactccagagatctacgttcccgaacaagatactttttacaagcaaaacccgaatagtatcgttcgtgcctatcattcgatcagcttgttgctgccggacggacgtgttttcaatggtggcggtggcttatgcggcgattgtgagacgaaccactttgatgcgcaaatctttacgccgaattatctttacgatagcaacgggaacttagccactcgccctaaaatcacccgtacctcaacccagtcagtcaaggtcggcgggtggatcaccatttggactgacatgtcgatctcggccgcaagtttaattcgctacggaactgctactcacacggtgaacaccgatcagcgacgcatcggcttgacgttaacgaacaacggaggtaattcgtacagctttcaagttccgtcggacagcggggttgctcttccgggatactggatgttgttcgttatgaattccgctggtgtaccctccgttgcgtcgacgattaacgttacccagggccaaactggccaccatcaccatcaccattag

SEQ ID NO: 122 - protein, 650 aa, Artificial Sequence
  Engineered variant of Galactose Oxidase from Fusarium graminearum
MASAPIGVAIPRNNWAVTCDSAQSGNECIKAIDGNKDTFWHTQYGANGDPKPPHTITIDMKTVQNVNGLSVLPRQDGNQNGWIGRHEVYLSSDGVNWGSPVASGSWFADSTTKYSNFETRPARYVRLVAITEANGQPWTSIAEINVFQASSYTAPQPELGRWGPTIDLPIVPSAAAIEPTSGRVLMWSSYRNDAFRDSPGGITLTSSWDPSTGIVSDRTSTVTGHDMFCPGISMDGNGQIVVSGGNDAKKTSLYDSSSDSWIPGPDMQVARGYNSSATMSDGRVFTIGGSFSGGQVEKNGEVYSPSSKTWTSLPNAKVNPMLTADKRGLYRSDNHAWLFGWKKGSVFQAGPSTAMNWYYTSGSGDVLSAGKRQSNRGVAPDAMCGNAVMYDAVKGKILTFGGSPDYEDSDATTNAHIITLGEPGTSPNTVFASNGLLFARTFHTSVVLPDGSVFITGGQQRAVPLEDSTPVFTPEIYVPEQDTFYKQNPNSIVRAYHSISLLLPDGRVFNGGGGLCGDCETNHFDAQIFTPNYLYDSNGNLATRPKITRTSTQSVKVGGWITIWTDMSISAASLIRYGTATHTVNTDQRRIGLTLTNNGGNSYSFQVPSDSGVALPGYWMLFVMNSAGVPSVASTINVTQGQTGHHHHHH

SEQ ID NO: 123 - DNA, 1953 bp, Artificial Sequence
  Engineered variant of Galactose Oxidase from Fusarium graminearum
atggcatcagcaccgatcggggtagccatcccgcgcaacaactgggccgttacatgcgattccgcccagagtgggaatgaatgcattaaggcaattgacggtaataaagacacgttttggcacactcaatatggtgtgaacggagatcccaaaccgccgcacaccatcacgatcgatatgaaaacagtacaaaacgtgaatggcctttctgtactgccacgtcaggatggcaatcagaatggatggatcggacgtcacgaggtgtatttaagttctgatggggtgaattggggatcgcctgtagcgtctgggtcctggtttgccgattccaccacaaagtactctaattttgagacacgtccggcccgttacgtgcgccttgtcgccattaccgaagccaatgggcaaccgtggacttcaattgccgagattaacgtatttcaggcgtctagttacactgccccgcagccgggcttggggcgctggggcccgacaatcgatcttcccattgtgccatcggccgccgcaatcgagccaacgagcggtcgtgtcttgatgtggagctcttatcgtaacgatgcgtttcgtgactctcctggcggtattacactgacgagctcatgggaccctagcactggaattgtatccgatcgcactagtaccgttaccgggcacgacatgttttgccccggtatctcgatggacgggaacggtcagatcgtggtcagcggtggtaatgatgcaaagaaaacttccttatatgattcgagctcggactcttggattccgggcccggatatgcaggtcgcgcgtgggtataactcaagtgcgactatgagtgatgggcgcgtatttacgattggcggcagttttagtggcggtgtagttgagaagaacggggaggtttactcgccgagctcgaagacttggacttcgctgccgaatgcaaaagttaaccccatgctgaccgccgataaacggggtctgtaccgtagcgataatcatgcttggctgtttgggtggaaaaagggtagcgtcttccaagcaggtccaagtactgccatgaactggtattatacatctgggtcgggggacgttaagagtgcagggaagcgtcaatcagaccgcggagtagccccagacgccatgtgcggtaatgccgtaatgtacgacgcagtcaaaggcaaaattttgactttcgggggctcgcccgattatgaggactcagatgcgactacaaatgcccatattatcacgctgggcgagcctggcacgagtccgaatacggtatttgcgagtaatgggttactgttcgctcgtacctttcatacctcggtggtccttccggacgggagtgtattcatcacaggaggccagcagcgcgcggttccactggaagatagcacacccgtatttactccagagatctacgttcccgaacaagatactttttacaagcaaaacccgaatagtatcgttcgtgcctatcattcgatcagcttgttgctgccggacggacgtgttttcaatggtggcggtggcttatgcggcgattgtgagacgaaccactttgatgcgcaaatctttacgccgaattatctttacgatagcaacgggaacttagccactcgccctaaaatcacccgtacctcaacccagtcagtcgtggtcggcgggtggatcaccatttggactgacatgtcgatctcggccgcaagtttaattcgctacggaactgctactcacacggtgaacaccgatcagcgacgcatcggcttgacgttaacgaacaacggaggtaattcgtacagctttcaagttccgtcggacagcggggttgctcttccgggatactggatgttgttcgttatgaattccgctggtgtaccctccgttgcgtcgacgattaatgttacccagggccaaactggccaccatcaccatcaccattag

SEQ ID NO: 124 - protein, 650 aa, Artificial Sequence
  Engineered variant of Galactose Oxidase from Fusarium graminearum
MASAPIGVAIPRNNWAVTCDSAQSGNECIKAIDGNKDTFWHTQYGVNGDPKPPHTITIDMKTVQNVNGLSVLPRQDGNQNGWIGRHEVYLSSDGVNWGSPVASGSWFADSTTKYSNFETRPARYVRLVAITEANGQPWTSIAEINVFQASSYTAPQPGLGRWGPTIDLPIVPSAAAIEPTSGRVLMWSSYRNDAFRDSPGGITLTSSWDPSTGIVSDRTSTVTGHDMFCPGISMDGNGQIVVSGGNDAKKTSLYDSSSDSWIPGPDMQVARGYNSSATMSDGRVFTIGGSFSGGVVEKNGEVYSPSSKTWTSLPNAKVNPMLTADKRGLYRSDNHAWLFGWKKGSVFQAGPSTAMNWYYTSGSGDVKSAGKRQSDRGVAPDAMCGNAVMYDAVKGKILTFGGSPDYEDSDATTNAHIITLGEPGTSPNTVFASNGLLFARTFHTSVVLPDGSVFITGGQQRAVPLEDSTPVFTPEIYVPEQDTFYKQNPNSIVRAYHSISLLLPDGRVFNGGGGLCGDCETNHFDAQIFTPNYLYDSNGNLATRPKITRTSTQSVVVGGWITIWTDMSISAASLIRYGTATHTVNTDQRRIGLTLTNNGGNSYSFQVPSDSGVALPGYWMLFVMNSAGVPSVASTINVTQGQTGHHHHHH

SEQ ID NO: 125 - DNA, 1953 bp, Artificial Sequence
  Engineered variant of Galactose Oxidase from Fusarium graminearum
atggcatcagcaccgatcggggtagccatcccgcgcaacaactgggccgttacatgcgattccgcccagagtgggaatgaatgcattaaggcaattgacggtaataaagacacgttttggcacactcaatatggtgtgaacggagatcccaaaccgccgcacaccatcacgatcgatatgaaaacagtacaaaacgtgaatggcctttctgtactgccacgtcaggatggcaatcagaatggatggatcggacgtcacgaggtgtatttaagttctgatggggtgaattggggatcgcctgtagcgtctgggtcctggtttgccgattccaccacaaagtactctaattttgagacacgtccggcccgttacgtgcgccttgtcgccattaccgaagccaatgggcaaccgtggacttcaattgccgagattaacgtatttcaggcgtctagttacactgccccgcagccgggcttggggcgctggggcccgacaatcgatcttcccattgtgccatcggccgccgcaatcgagccaacgagcggtcgtgtcttgatgtggagctcttatcgtaacgatgcgtttcgtgactctcctggcggtattacactgacgagctcatgggaccctagcactggaattgtatccgatcgcactagtaccgttaccgggcacgacatgttttgccccggtatctcgatggacgggaacggtcagatcgtggtcagcggtggtaatgatgcaaagaaaacttccttatatgattcgagctcggactcttggattccgggcccggatatgcaggtcgcgcgtgggtataactcaagtgcgactatgagtgatgggcgcgtatttacgattggcggcagttttagtggcggtcaagttgagaagaacggggaggtttactcgccgagctcgaagacttggacttcgctgccgaatgcaaaagttaaccccatgctgaccgccgataaacggggtctgtaccgtagcgataatcatgcttggctgtttgggtggaaaaagggtagcgtcttccaagcaggtccaagtactgccatgaactggtattatacatctgggtcgggggacgttaagagtgcagggaagcgtcaatcagaccgcggagtagccccagacgccatgtgcggtaatgccgtaatgtacgacgcagtcaaaggcaaaattttgactttcgggggctcgcccgattatgaggactcagatgcgactacaaatgcccatattatcacgctgggcgagcctggcacgagtccgaatacggtatttgcgagtaatgggttaaatttcgctcgtacctttcatacctcggtggtccttccggacgggagtgtattcatcacaggaggccagcagcgcgcggttccactggaagatagcacacccgtatttactccagagatctacgttcccgaacaagatactttttacaagcaaaacccgaatagtatcgttcgtgcctatcattcgatcagcttgttgctgccggacggacgtgttttcaatggtggcggtggcttatgcggcgattgtgagacgaaccactttgatgcgcaaatctttacgccgaattatctttacgatagcaacgggaacttagccactcgccctaaaatcacccgtacctcaacccagtcagtcaaggtcggcgggtggatcaccatttggactgacatgtcgatctcggccgcaagtttaattcgctacggaactgctactcacacggtgaacaccgatcagcgacgcatcggcttgacgttaacgaacaacggaggtaattcgtacagctttcaagttccgtcggacagcggggttgctcttccgggatactggatgttgttcgttatgaattccgctggtgtaccctccgttgcgtcgacgattaacgttacccagggccaaactggccaccatcaccatcaccattag

SEQ ID NO: 126 - protein, 650 aa, Artificial Sequence
  Engineered variant of Galactose Oxidase from Fusarium graminearum
MASAPIGVAIPRNNWAVTCDSAQSGNECIKAIDGNKDTFWHTQYGVNGDPKPPHTITIDMKTVQNVNGLSVLPRQDGNQNGWIGRHEVYLSSDGVNWGSPVASGSWFADSTTKYSNFETRPARYVRLVAITEANGQPWTSIAEINVFQASSYTAPQPGLGRWGPTIDLPIVPSAAAIEPTSGRVLMWSSYRNDAFRDSPGGITLTSSWDPSTGIVSDRTSTVTGHDMFCPGISMDGNGQIVVSGGNDAKKTSLYDSSSDSWIPGPDMQVARGYNSSATMSDGRVFTIGGSFSGGQVEKNGEVYSPSSKTWTSLPNAKVNPMLTADKRGLYRSDNHAWLFGWKKGSVFQAGPSTAMNWYYTSGSGDVKSAGKRQSDRGVAPDAMCGNAVMYDAVKGKILTFGGSPDYEDSDATTNAHIITLGEPGTSPNTVFASNGLNFARTFHTSVVLPDGSVFITGGQQRAVPLEDSTPVFTPEIYVPEQDTFYKQNPNSIVRAYHSISLLLPDGRVFNGGGGLCGDCETNHFDAQIFTPNYLYDSNGNLATRPKITRTSTQSVKVGGWITIWTDMSISAASLIRYGTATHTVNTDQRRIGLTLTNNGGNSYSFQVPSDSGVALPGYWMLFVMNSAGVPSVASTINVTQGQTGHHHHHH

SEQ ID NO: 127 - DNA, 1953 bp, Artificial Sequence
  Engineered variant of Galactose Oxidase from Fusarium graminearum
atggcatcagcaccgatcggggtagccatcccgcgcaacaactgggccgttacatgcgattccgcccagagtgggaatgaatgcattaaggcaattgacggtaataaagacacgttttggcacactcaatatggtgtaaacggagatcccaaaccgccgcacaccatcacgatcgatatgaaaacagtacaaaacgtgaatggcctttctgtactgccacgtcaggatggcaatcagaatggatggatcggacgtcacgaggtgtatttaagttctgatggggtgaattggggatcgcctgtagcgtctgggtcctggtttgccgattccaccacaaagtactctaattttgagacacgtccggcccgttacgtgcgccttgtcgccattaccgaagccaatgggcaaccgtggacttcaattgccgagattaacgtatttcaggcgtctagttacactgccccgcagccggagttggggcgctggggcccgacaatcgatcttcccattgtgccatcggccgccgcaatcgagccaacgagcggtcgtgtcttgatgtggagctcttatcgtaacgatgcgtttcgtgactctcctggcggtattacactgacgagctcatgggaccctagcactggaattgtatccgatcgcactagtaccgttaccgggcacgacatgttttgccccggtatctcgatggacgggaacggtcagatcgtggtcagcggtggtaatgatgcaaagaaaacttccttatatgattcgagctcggactcttggattccgggcccggatatgcaggtcgcgcgtgggtatcaatcaagtgcgactatgagtgatgggcgcgtatttacgattggcggcagttttagtggcggtcaagttgagaagaacggggaggtttacgagccgagctcgaagacttggacttcgctgccgaatgcaaaagttaaccccatgctgaccgccgataaacggggtctgtaccgtagcgataatcatgcttggctgtttgggtggaaaaagggtagcgtcttccaagcaggtccaagtactgccatgaactggtattatacatctgggtcgggggacgttaagagtgcagggaagcgtcaatcagaccgcggagtagccccagacgccatgtgcggtaatgccgtaatgtacgacgcagtcaaaggcaaaattttgactttcgggggctcgcccgattatgaggactcagatgcgactacaaatgcccatattatcacgctgggcgagcctggcacgagtccgaatacggtatttgcgagtaatgggttactgttcgctcgtacctttcatacctcggtggtccttccggacgggagtgtattcatcacaggaggccagcagcgcgcggttccactggaagatagcacacccgtatttactccagagatctacgttcccgaacaagatactttttacaagcaaaacccgaatagtatcgttcgtgcctatcattcgatcagcttgttgctgccggacggacgtgttttcaatggtggcggtggcttatgcggcgattgtgagacgaaccactttgatgcgcaaatctttacgccgaattatctttacgatagcaacgggaacttagccactcgccctaaaatcacccgtacctcaacccagtcagtcgtggtcggcgggtggatcaccatttggactgacatgtcgatctcggccgcaagtttaattcgctacggaactgctactcacacggtgaacaccgatcagcgacgcatcggcttgacgttaacgaacaacggaggtaattcgtacagctttcaagttccgtcggacagcggggttgctcttccgggatactggatgttgttcgttatgaattccgctggtgtaccctccgttgcgtcgacgattaacgttacccagggccaaactggccaccatcaccatcaccattag

SEQ ID NO: 128 - protein, 650 aa, Artificial Sequence
  Engineered variant of Galactose Oxidase from Fusarium graminearum
MASAPIGVAIPRNNWAVTCDSAQSGNECIKAIDGNKDTFWHTQYGVNGDPKPPHTITIDMKTVQNVNGLSVLPRQDGNQNGWIGRHEVYLSSDGVNWGSPVASGSWFADSTTKYSNFETRPARYVRLVAITEANGQPWTSIAEINVFQASSYTAPQPELGRWGPTIDLPIVPSAAAIEPTSGRVLMWSSYRNDAFRDSPGGITLTSSWDPSTGIVSDRTSTVTGHDMFCPGISMDGNGQIVVSGGNDAKKTSLYDSSSDSWIPGPDMQVARGYQSSATMSDGRVFTIGGSFSGGQVEKNGEVYEPSSKTWTSLPNAKVNPMLTADKRGLYRSDNHAWLFGWKKGSVFQAGPSTAMNWYYTSGSGDVKSAGKRQSDRGVAPDAMCGNAVMYDAVKGKILTFGGSPDYEDSDATTNAHIITLGEPGTSPNTVFASNGLLFARTFHTSVVLPDGSVFITGGQQRAVPLEDSTPVFTPEIYVPEQDTFYKQNPNSIVRAYHSISLLLPDGRVFNGGGGLCGDCETNHFDAQIFTPNYLYDSNGNLATRPKITRTSTQSVVVGGWITIWTDMSISAASLIRYGTATHTVNTDQRRIGLTLTNNGGNSYSFQVPSDSGVALPGYWMLFVMNSAGVPSVASTINVTQGQTGHHHHHH

SEQ ID NO: 129 - DNA, 1953 bp, Artificial Sequence
  Engineered variant of Galactose Oxidase from Fusarium graminearum
atggcatcagcaccgatcggggtagccatcccgcgcaacaactgggccgttacatgcgattccgcccagagtgggaatgaatgcattaaggcaattgacggtaataaagacacgttttggcacactcaatatggtgtgaacggagatcccaaaccgccgcacaccatcacgatcgatatgaaaacagtacaaaacgtgaatggcctttctgtactgccacgtcaggatggcaatcagaatggatggatcggacgtcacgaggtgtatttaagttctgatggggtgaattggggatcgcctgtagcgtctgggtcctggtttgccgattccaccacaaagtactctaattttgagacacgtccggcccgttacgtgcgccttgtcgccattaccgaagccaatgggcaaccgtggacttcaattgccgagattaacgtatttcaggcgtctagttacactgccccgcagccgggcttggggcgctggggcccgacaatcgatcttcccattgtgccatcggccgccgcaatcgagccaacgagcggtcgtgtcttgatgtggagctcttatcgtaacgatgcgtttcgtgactctcctggcggtattacactgacgagctcatgggaccctagcactggaattgtatccgatcgcactagtaccgttaccgggcacgacatgttttgccccggtatctcgatggacgggaacggtcagatcgtggtcagcggtggtaatgatgcaaagaaaacttccttatatgattcgagctcggactcttggattccgggcccggatatgcaggtcgcgcgtgggtataactcaagtgcgactatgagtgatgggcgcgtatttacgattggcggcagttttagtggcggtcaagttgagaagaacggggaggtttacgagccgagctcgaagacttggacttcgctgccgaatgcaaaagttaaccccatgctgaccgccgataaacggggtctgtaccgtagcgataatcatgcttggctgtttgggtggaaaaagggtagcgtcttccaagcaggtccaagtactgccatgaactggtattatacatctgggtcggggggcgttaagagtgcagggaagcgtcaatcagaccgcggagtagccccagacgccatgtgcggtaatgccgtaatgtacgacgcagtcaaaggcaaaattttgactttcgggggctcgcccgattatgaggactcagatgcgactacaaatgcccatattatcacgctgggcgagcctggcacgagtccgaatacggtatttgcgagtaatgggttaaatttcgctcgtacctttcatacctcggtggtccttccggacgggagtgtattcatcacaggaggccagcagcgcgcggttccactggaagatagcacacccgtatttactccagagatctacgttcccgaacaagatactttttacaagcaaaacccgaatagtatcgttcgtgcctatcattcgatcagcttgttgctgccggacggacgtgttttcaatggtggcggtggcttatgcggcgattgtgagacgaaccactttgatgcgcaaatctttacgccgaattatctttacgatagcaacgggaacttagccactcgccctaaaatcacccgtacctcaacccagtcagtcgtggtcggcgggtggatcaccatttggactgacatgtcgatctcggccgcaagtttaattcgctacggaactgctactcacacggtgaacaccgatcagcgacgcatcggcttgacgttaacgaacaacggaggtaattcgtacagctttcaagttccgtcggacagcggggttgctcttccgggatactggatgttgttcgttatgaattccgctggtgtaccctccgttgcgtcgacgattaacgttacccagggccaaactggccaccatcaccatcaccattag

SEQ ID NO: 130 - protein, 650 aa, Artificial Sequence
  Engineered variant of Galactose Oxidase from Fusarium graminearum
MASAPIGVAIPRNNWAVTCDSAQSGNECIKAIDGNKDTFWHTQYGVNGDPKPPHTITIDMKTVQNVNGLSVLPRQDGNQNGWIGRHEVYLSSDGVNWGSPVASGSWFADSTTKYSNFETRPARYVRLVAITEANGQPWTSIAEINVFQASSYTAPQPGLGRWGPTIDLPIVPSAAAIEPTSGRVLMWSSYRNDAFRDSPGGITLTSSWDPSTGIVSDRTSTVTGHDMFCPGISMDGNGQIVVSGGNDAKKTSLYDSSSDSWIPGPDMQVARGYNSSATMSDGRVFTIGGSFSGGQVEKNGEVYEPSSKTWTSLPNAKVNPMLTADKRGLYRSDNHAWLFGWKKGSVFQAGPSTAMNWYYTSGSGGVKSAGKRQSDRGVAPDAMCGNAVMYDAVKGKILTFGGSPDYEDSDATTNAHIITLGEPGTSPNTVFASNGLNFARTFHTSVVLPDGSVFITGGQQRAVPLEDSTPVFTPEIYVPEQDTFYKQNPNSIVRAYHSISLLLPDGRVFNGGGGLCGDCETNHFDAQIFTPNYLYDSNGNLATRPKITRTSTQSVVVGGWITIWTDMSISAASLIRYGTATHTVNTDQRRIGLTLTNNGGNSYSFQVPSDSGVALPGYWMLFVMNSAGVPSVASTINVTQGQTGHHHHHH

SEQ ID NO: 131 - DNA, 1953 bp, Artificial Sequence
  Engineered variant of Galactose Oxidase from Fusarium graminearum
atggcatcagcaccgatcggggtagccatcccgcgcaacaactgggccgttacatgcgattccgcccagagtgggaatgaatgcattaaggcaattgacggtaataaagacacgttttggcacactcaatatggtgtgaacggagatcccaaaccgccgcacaccatcacgatcgatatgaaaacagtacaaaacgtgaatggcctttctgtactgccacgtcaggatggcaatcagaatggatggatcggacgtcacgaggtgtatttaagttctgatggggtgaattggggatcgcctgtagcgtctgggtcctggtttgccgattccaccacaaagtactctaattttgagacacgtccggcccgttacgtgcgccttgtcgccattaccgaagccaatgggcaaccgtggacttcaattgccgagattaacgtatttcaggcgtctagttacactgccccgcagccgggcttggggcgctggggcccgacaatcgatcttcccattgtgccatcggccgccgcaatcgagccaacgagcggtcgtgtcttgatgtggagctcttatcgtcaggatgcgtttcgtgactctcctggcggtattacactgacgagctcatgggaccctagcactggaattgtatccgaacgcactagtaccgttaccgggcacgacatgttttgccccggtatctcgatggacgggaacggtcagatcgtggtcagcggtggtaatgatgcaaagaaaacttccttatatgattcgagctcggactcttggattccgggcccggatatgcaggtcgcgcgtgggtataattcaagtgcgactatgagtgatgggcgcgtatttacgattggcggcagttttagtggcggtcaagttgagaagaacggggaggtttacgagccgagctcgaagacttggacttcgctgccgaatgcaaaagttaaccccatgctgaccgccgataaacggggtctgtaccgtagcgataatcatgcttggctgtttgggtggaaaaagggtagcgtcttccaagcaggtccaagtactgccatgaactggtattatacatctgggtcgggggacgttaagagtgcagggaagcgtcaatcagaccgcggagtagccccagacgccatgtgcggtaatgccgtaatgtacgacgcagtcaaaggcaaaattttgactttcgggggctcgcccgattatgaggactcagatgcgactacaaatgcccatattatcacgctgggcgagcctggcacgagtccgaatacggtatttgcgagtaatgggttaaatttcgctcgtacctttcatacctcggtggtccttccggacgggagtgtattcatcacaggaggccagcagcgcgcggttccactggaagatagcacacccgtatttactccagagatctacgttcccgaacaagatactttttacaagcaaaacccgaatagtatcgttcgtgcctatcattcgatcagcttgttgctgccggacggacgtgttttcaatggtggcggtggcttatgcggcgattgtgagacgaaccactttgatgcgcaaatctttacgccgaattatctttacgatagcaacgggaacttagccactcgccctaaaatcacccgtacctcaacccagtcagtcgtcgtcggcgggtggatcaccatttggactgacatgtcgatctcggccgcaagtttaattcgctacggaactgctactcacacggtgaacaccgatcagcgacgcatcggcttgacgttaacgaacaacggaggtaattcgtacagctttcaagttccgtcggacagcggggttgctcttccgggatactggatgttgttcgttatgaattccgctggtgtaccctccgttgcgtcgacgattaacgttacccagggccaaactggccaccatcaccatcaccattag

SEQ ID NO: 132 - protein, 650 aa, Artificial Sequence
  Engineered variant of Galactose Oxidase from Fusarium graminearum
MASAPIGVAIPRNNWAVTCDSAQSGNECIKAIDGNKDTFWHTQYGVNGDPKPPHTITIDMKTVQNVNGLSVLPRQDGNQNGWIGRHEVYLSSDGVNWGSPVASGSWFADSTTKYSNFETRPARYVRLVAITEANGQPWTSIAEINVFQASSYTAPQPGLGRWGPTIDLPIVPSAAAIEPTSGRVLMWSSYRQDAFRDSPGGITLTSSWDPSTGIVSERTSTVTGHDMFCPGISMDGNGQIVVSGGNDAKKTSLYDSSSDSWIPGPDMQVARGYNSSATMSDGRVFTIGGSFSGGQVEKNGEVYEPSSKTWTSLPNAKVNPMLTADKRGLYRSDNHAWLFGWKKGSVFQAGPSTAMNWYYTSGSGDVKSAGKRQSDRGVAPDAMCGNAVMYDAVKGKILTFGGSPDYEDSDATTNAHIITLGEPGTSPNTVFASNGLNFARTFHTSVVLPDGSVFITGGQQRAVPLEDSTPVFTPEIYVPEQDTFYKQNPNSIVRAYHSISLLLPDGRVFNGGGGLCGDCETNHFDAQIFTPNYLYDSNGNLATRPKITRTSTQSVVVGGWITIWTDMSISAASLIRYGTATHTVNTDQRRIGLTLTNNGGNSYSFQVPSDSGVALPGYWMLFVMNSAGVPSVASTINVTQGQTGHHHHHH

SEQ ID NO: 133 - DNA, 1953 bp, Artificial Sequence
  Engineered variant of Galactose Oxidase from Fusarium graminearum
atggcatcagcaccgatcggggtagccatcccgcgcaacaactgggccgttacatgcgattccgcccagagtgggaatgaatgcattaaggcaattgacggtaataaagacacgttttggcacactcaatatggtgtgaacggagatcccaaaccgccgcacaccatcacgatcgatatgaaaacagtacaaaacgtgaatggcctttctgtactgccacgtcaggatggcaatcagaatggatggatcggacgtcacgaggtgtatttaagttctgatggggtgaattggggatcgcctgtagcgtctgggtcctggtttgccgattccaccacaaagtactctaattttgagacacgtccggcccgttacgtgcgccttgtcgccattaccgaagccaatgggcaaccgtggacttcaattgccgagattaacgtatttcaggcgtctagttacactgccccgcagccggagttggggcgctggggcccgacaatcgatcttcccattgtgccatcggccgccgcaatcgagccaacgagcggtcgtgtcttgatgtggagctcttatcgtaacgatgcgtttcgtgactctcctggcggtattacactgacgagctcatgggaccctagcactggaattgtatccgatcgcactagtaccgttaccgggcacgacatgttttgccccggtatctcgatggacgggaacggtcagatcgtggtcagcggtggtaatgatgcaaagaaaacttccttatatgattcgagctcggactcttggattccgggcccggatatgcaggtcgcgcgtgggtataattcaagtgcgactatgagtgatgggcgcgtatttacgattggcggcagttttagtggcggtcaagttgagaagaacggggaggtttactccccgagctcgaagacttggacttcgctgccgaatgcaaaagttaaccccatgctgaccgccgataaacggggtctgtaccgtagcgataatcatgcttggctgtttgggtggaaaaagggtagcgtcttccaagcaggtccaagtactgccatgaactggtattatacatctgggtcgggggacgttctgagtgcagggaagcgtcaatcagaccgcggagtagccccagacgccatgtgcggtaatgccgtaatgtacgacgcagtcaaaggcaaaattttgactttcgggggctcgcccgattatgaggactcagatgcgactacaaatgcccatattatcacgctgggcgagcctggcacgagtccgaatacggtatttgcgagtaatgggttactgttcgctcgtacctttcatacctcggtggtccttccggacgggagtgtattcatcacaggaggccagcagcgcgcggttccactggaagatagcacacccgtatttactccagagatctacgttcccgaacaagatactttttacaagcaaaacccgaatagtatcgttcgtgcctatcattcgatcagcttgttgctgccggacggacgtgttttcaatggtggcggtggcttatgcggcgattgtgagacgaaccactttgatgcgcaaatctttacgccgaattatctttacgatagcaacgggaacttagccactcgccctaaaatcacccgtacctcaacccagtcagtcaaggtcggcgggtggatcaccatttggactgacatgtcgatctcggccgcaagtttaattcgctacggaactgctactcacacggtgaacaccgatcagcgacgcatcggcttgacgttaacgaacaacggaggtaattcgtacagctttcaagttccgtcggacagcggggttgctcttccgggatactggatgttgttcgttatgaattccgctggtgtaccctccgttgcgtcgacgattaacgttacccagggccaaactggccaccatcaccatcaccattag

SEQ ID NO: 134 - protein, 650 aa, Artificial Sequence
  Engineered variant of Galactose Oxidase from Fusarium graminearum
MASAPIGVAIPRNNWAVTCDSAQSGNECIKAIDGNKDTFWHTQYGVNGDPKPPHTITIDMKTVQNVNGLSVLPRQDGNQNGWIGRHEVYLSSDGVNWGSPVASGSWFADSTTKYSNFETRPARYVRLVAITEANGQPWTSIAEINVFQASSYTAPQPELGRWGPTIDLPIVPSAAAIEPTSGRVLMWSSYRNDAFRDSPGGITLTSSWDPSTGIVSDRTSTVTGHDMFCPGISMDGNGQIVVSGGNDAKKTSLYDSSSDSWIPGPDMQVARGYNSSATMSDGRVFTIGGSFSGGQVEKNGEVYSPSSKTWTSLPNAKVNPMLTADKRGLYRSDNHAWLFGWKKGSVFQAGPSTAMNWYYTSGSGDVLSAGKRQSDRGVAPDAMCGNAVMYDAVKGKILTFGGSPDYEDSDATTNAHIITLGEPGTSPNTVFASNGLLFARTFHTSVVLPDGSVFITGGQQRAVPLEDSTPVFTPEIYVPEQDTFYKQNPNSIVRAYHSISLLLPDGRVFNGGGGLCGDCETNHFDAQIFTPNYLYDSNGNLATRPKITRTSTQSVKVGGWITIWTDMSISAASLIRYGTATHTVNTDQRRIGLTLTNNGGNSYSFQVPSDSGVALPGYWMLFVMNSAGVPSVASTINVTQGQTGHHHHHH

SEQ ID NO: 135 - DNA, 1953 bp, Artificial Sequence
  Engineered variant of Galactose Oxidase from Fusarium graminearum
atggcatcagcaccgatcggggtagccatcccgcgcaacaactgggccgttacatgcgattccgcccagagtgggaatgaatgcattaaggcaattgacggtaataaagacacgttttggcacactcaatatggtgtgaacggagatcccaaaccgccgcacaccatcacgatcgatatgaaaacagtacaaaacgtgaatggcctttctgtactgccacgtcaggatggcaatcagaatggatggatcggacgtcacgaggtgtatttaagttctgatggggtgaattggggatcgcctgtagcgtctgggtcctggtttgccgattccaccacaaagtactctaattttgagacacgtccggcccgttacgtgcgccttgtcgccattaccgaagccaatgggcaaccgtggacttcaattgccgagattaacgtatttcaggcgtctagttacactgccccgcagccggggttggggcgctggggcccgacaatcgatcttcccattgtgccatcggccgccgcaatcgagccaacgagcggtcgtgtcttgatgtggagctcttatcgtaacgatgcgtttcgtgactctcctggcggtattacactgacgagctcatgggaccctagcactggaattgtatccgaacgcactagtaccgttaccgggcacgacatgttttgccccggtatctcgatggacgggaacggtcagatcgtggtcagcggtggtaatgatgcaaagaaaacttccttatatgattcgagctcggactcttggattccgggcccggatatgcaggtcgcgcgtgggtataattcaagtgcgactatgagtgatgggcgcgtatttacgattggcggcagttttagtggcggtcaagttgagaagaacggggaggtttactccccgagctcgaagacttggacttcgctgccgaatgcaaaagttaaccccatgctgaccgccgataaacggggtctgtaccgtagcgataatcatgcttggctgtttgggtggaaaaagggtagcgtcttccaagcaggtccaagtactgccatgaactggtattatacatctgggtcgggggacgttaagagtgcagggaagcgtcaatcagaccgcggagtagccccagacgccatgtgcggtaatgccgtaatgtacgacgcagtcaaaggcaaaattttgactttcgggggctcgcccgattatgaggactcagatgcgactacaaatgcccatattatcacgctgggcgagcctggcacgagtccgaatacggtatttgcgagtaatgggttactgttcgctcgtacctttcatacctcggtggtccttccggacgggagtgtattcatcacaggaggccagcagcgcgcggttccactggaagatagcacacccgtatttactccagagatctacgttcccgaacaagatactttttacaagcaaaacccgaatagtatcgttcgtgcctatcattcgatcagcttgttgctgccggacggacgtgttttcaatggtggcggtggcttatgcggcgattgtgagacgaaccactttgatgcgcaaatctttacgccgaattatctttacgatagcaacgggaacttagccactcgccctaaaatcacccgtacctcaacccagtcagtcaaggtcggcgggtggatcaccatttggactgacatgtcgatctcggccgcaagtttaattcgctacggaactgctactcacacggtgaacaccgatcagcgacgcatcggcttgacgttaacgaacaacggaggtaattcgtacagctttcaagttccgtcggacagcggggttgctcttccgggatactggatgttgttcgttatgaattccgctggtgtaccctccgttgcgtcgacgattaatgttacccagggccaaactggccaccatcaccatcaccattag

SEQ ID NO: 136 - protein, 650 aa, Artificial Sequence
  Engineered variant of Galactose Oxidase from Fusarium graminearum
MASAPIGVAIPRNNWAVTCDSAQSGNECIKAIDGNKDTFWHTQYGVNGDPKPPHTITIDMKTVQNVNGLSVLPRQDGNQNGWIGRHEVYLSSDGVNWGSPVASGSWFADSTTKYSNFETRPARYVRLVAITEANGQPWTSIAEINVFQASSYTAPQPGLGRWGPTIDLPIVPSAAAIEPTSGRVLMWSSYRNDAFRDSPGGITLTSSWDPSTGIVSERTSTVTGHDMFCPGISMDGNGQIVVSGGNDAKKTSLYDSSSDSWIPGPDMQVARGYNSSATMSDGRVFTIGGSFSGGQVEKNGEVYSPSSKTWTSLPNAKVNPMLTADKRGLYRSDNHAWLFGWKKGSVFQAGPSTAMNWYYTSGSGDVKSAGKRQSDRGVAPDAMCGNAVMYDAVKGKILTFGGSPDYEDSDATTNAHIITLGEPGTSPNTVFASNGLLFARTFHTSVVLPDGSVFITGGQQRAVPLEDSTPVFTPEIYVPEQDTFYKQNPNSIVRAYHSISLLLPDGRVFNGGGGLCGDCETNHFDAQIFTPNYLYDSNGNLATRPKITRTSTQSVKVGGWITIWTDMSISAASLIRYGTATHTVNTDQRRIGLTLTNNGGNSYSFQVPSDSGVALPGYWMLFVMNSAGVPSVASTINVTQGQTGHHHHHH

SEQ ID NO: 137 - DNA, 1953 bp, Artificial Sequence
  Engineered variant of Galactose Oxidase from Fusarium graminearum
atggcatcagcaccgatcggggtagccatcccgcgcaacaactgggccgttacatgcgattccgcccagagtgggaatgaatgcattaaggcaattgacggtaataaagacacgttttggcacactcaatatggtgtaaacggagatcccaaaccgccgcacaccatcacgatcgatatgaaaacagtacaaaacgtgaatggcctttctgtactgccacgtcaggatggcaatcagaatggatggatcggacgtcacgaggtgtatttaagttctgatggggtgaattggggatcgcctgtagcgtctgggtcctggtttgccgattccaccacaaagtactctaattttgagacacgtccggcccgttacgtgcgccttgtcgccattaccgaagccaatgggcaaccgtggacttcaattgccgagattaacgtatttcaggcgtctagttacactgccccgcagccggggttggggcgctggggcccgacaatcgatcttcccattgtgccatcggccgccgcaatcgagccaacgagcggtcgtgtcttgatgtggagctcttatcgtaacgatgcgtttcgtgactctcctggcggtattacactgacgagctcatgggaccctagcactggaattgtatccgatcgcactagtaccgttaccgggcacgacatgttttgccccggtatctcgatggacgggaacggtcagatcgtggtcagcggtggtaatgatgcaaagaaaacttccttatatgattcgagctcggactcttggattccgggcccggatatgcaggtcgcgcgtgggtataactcaagtgcgactatgagtgatgggcgcgtatttacgattggcggcagttttagtggcggtcaagttgagaagaacggggaggtttactcgccgagctcgaagacttggacttcgctgccgaatgcaaaagttaaccccatgctgaccgccgataaacggggtctgtaccgtagcgataatcatgcttggctgtttgggtggaaaaagggtagcgtcttccaagcaggtccaagtactgccatgaactggtattatacatctgggtcgggggacgttaagagtgcagggaagcgtcaatcagaccgcggagtagccccagacgccatgtgcggtaatgccgtaatgtacgacgcagtcaaaggcaaaattttgactttcgggggctcgcccgattatgaggactcagatgcgactacaaatgcccatattatcacgctgggcgagcctggcacgagtccgaatacggtatttgcgagtaatgggttactgttcgctcgtacctttcatacctcggtggtccttccggacgggagtgtattcatcacaggaggccagcagcgcgcggttccactggaagatagcacacccgtatttactccagagatctacgttcccgaacaagatactttttacaagcaaaacccgaatagtatcgttcgtgcctatcattcgatcagcttgttgctgccggacggacgtgttttcaatggtggcggtggcttatgcggcgattgtgagacgaaccactttgatgcgcaaatctttacgccgaattatctttacgatagcaacgggaacttagccactcgccctaaaatcacccgtacctcaacccagtcagtcgtggtcggcgggtggatcaccatttggactgacatgtcgatctcggccgcaagtttaattcgctacggaactgctactcacacggtgaacaccgatcagcgacgcatcggcttgacgttaacgaacaacggaggtaattcgtacagctttcaagttccgtcggacagcggggttgctcttccgggatactggatgttgttcgttatgaattccgctggtgtaccctccgttgcgtcgacgattaacgttacccagggccaaactggccaccatcaccatcaccattag

SEQ ID NO: 138 - protein, 650 aa, Artificial Sequence
  Engineered variant of Galactose Oxidase from Fusarium graminearum
MASAPIGVAIPRNNWAVTCDSAQSGNECIKAIDGNKDTFWHTQYGVNGDPKPPHTITIDMKTVQNVNGLSVLPRQDGNQNGWIGRHEVYLSSDGVNWGSPVASGSWFADSTTKYSNFETRPARYVRLVAITEANGQPWTSIAEINVFQASSYTAPQPGLGRWGPTIDLPIVPSAAAIEPTSGRVLMWSSYRNDAFRDSPGGITLTSSWDPSTGIVSDRTSTVTGHDMFCPGISMDGNGQIVVSGGNDAKKTSLYDSSSDSWIPGPDMQVARGYNSSATMSDGRVFTIGGSFSGGQVEKNGEVYSPSSKTWTSLPNAKVNPMLTADKRGLYRSDNHAWLFGWKKGSVFQAGPSTAMNWYYTSGSGDVKSAGKRQSDRGVAPDAMCGNAVMYDAVKGKILTFGGSPDYEDSDATTNAHIITLGEPGTSPNTVFASNGLLFARTFHTSVVLPDGSVFITGGQQRAVPLEDSTPVFTPEIYVPEQDTFYKQNPNSIVRAYHSISLLLPDGRVFNGGGGLCGDCETNHFDAQIFTPNYLYDSNGNLATRPKITRTSTQSVVVGGWITIWTDMSISAASLIRYGTATHTVNTDQRRIGLTLTNNGGNSYSFQVPSDSGVALPGYWMLFVMNSAGVPSVASTINVTQGQTGHHHHHH

SEQ ID NO: 139 - DNA, 1953 bp, Artificial Sequence
  Engineered variant of Galactose Oxidase from Fusarium graminearum
atggcatcagcaccgatcggggtagccatcccgcgcaacaactgggccgttacatgcgattccgcccagagtgggaatgaatgcattaaggcaattgacggtaataaagacacgttttggcacactcaatatggtgtgaacggagatcccaaaccgccgcacaccatcacgatcgatatgaaaacagtacaaaacgtgaatggcctttctgtactgccacgtcaggatggcaatcagaatggatggatcggacgtcacgaggtgtatttaagttctgatggggtgaattggggatcgcctgtagcgtctgggtcctggtttgccgattccaccacaaagtactctaattttgagacacgtccggcccgttacgtgcgccttgtcgccattaccgaagccaatgggcaaccgtggacttcaattgccgagattaacgtatttcaggcgtctagttacactgccccgcagccgggcttggggcgctggggcccgacaatcgatcttcccattgtgccatcggccgccgcaatcgagccaacgagcggtcgtgtcttgatgtggagctcttatcgtaacgatgcgtttcgtgactctcctggcggtattacactgacgagctcatgggaccctagcactggaattgtatccgatcgcactagtaccgttaccgggcacgacatgttttgccccggtatctcgatggacgggaacggtcagatcgtggtcagcggtggtaatgatgcaaagaaaacttccttatatgattcgagctcggactcttggattccgggcccggatatgcaggtcgcgcgtgggtataattcaagtgcgactatgagtgatgggcgcgtatttacgattggcggcagttttagtggcggtcaagttgagaagaacggggaggtttacgagccgagctcgaagacttggacttcgctgccgaatgcaaaagttaaccccatgctgaccgccgataaacggggtctgtaccgtagcgataatcatgcttggctgtttgggtggaaaaagggtagcgtcttccaagcaggtccaagtactgccatgaactggtattatacatctgggtcgggggacgttctgagtgcagggaagcgtcaatcagaccgcggagtagccccagacgccatgtgcggtaatgccgtaatgtacgacgcagtcaaaggcaaaattttgactttcgggggctcgcccgattatgaggactcagatgcgactacaaatgcccatattatcacgctgggcgagcctggcacgagtccgaatacggtatttgcgagtaatgggttactgttcgctcgtacctttcatacctcggtggtccttccggacgggagtgtattcatcacaggaggccagcagcgcgcggttccactggaagatagcacacccgtatttactccagagatctacgttcccgaacaagatactttttacaagcaaaacccgaatagtatcgttcgtgcctatcattcgatcagcttgttgctgccggacggacgtgttttcaatggtggcggtggcttatgcggcgattgtgagacgaaccactttgatgcgcaaatctttacgccgaattatctttacgatagcaacgggaacttagccactcgccctaaaatcacccgtacctcaacccagtcagtcgtggtcggcgggtggatcaccatttggactgacatgtcgatctcggccgcaagtttaattcgctacggaactgctactcacacggtgaacaccgatcagcgacgcatcggcttgacgttaacgaacaacggaggtaattcgtacagctttcaagttccgtcggacagcggggttgctcttccgggatactggatgttgttcgttatgaattccgctggtgtaccctccgttgcgtcgacgattaacgttacccagggccaaactggccaccatcaccatcaccattag

SEQ ID NO: 140 - protein, 650 aa, Artificial Sequence
  Engineered variant of Galactose Oxidase from Fusarium graminearum
MASAPIGVAIPRNNWAVTCDSAQSGNECIKAIDGNKDTFWHTQYGVNGDPKPPHTITIDMKTVQNVNGLSVLPRQDGNQNGWIGRHEVYLSSDGVNWGSPVASGSWFADSTTKYSNFETRPARYVRLVAITEANGQPWTSIAEINVFQASSYTAPQPGLGRWGPTIDLPIVPSAAAIEPTSGRVLMWSSYRNDAFRDSPGGITLTSSWDPSTGIVSDRTSTVTGHDMFCPGISMDGNGQIVVSGGNDAKKTSLYDSSSDSWIPGPDMQVARGYNSSATMSDGRVFTIGGSFSGGQVEKNGEVYEPSSKTWTSLPNAKVNPMLTADKRGLYRSDNHAWLFGWKKGSVFQAGPSTAMNWYYTSGSGDVLSAGKRQSDRGVAPDAMCGNAVMYDAVKGKILTFGGSPDYEDSDATTNAHIITLGEPGTSPNTVFASNGLLFARTFHTSVVLPDGSVFITGGQQRAVPLEDSTPVFTPEIYVPEQDTFYKQNPNSIVRAYHSISLLLPDGRVFNGGGGLCGDCETNHFDAQIFTPNYLYDSNGNLATRPKITRTSTQSVVVGGWITIWTDMSISAASLIRYGTATHTVNTDQRRIGLTLTNNGGNSYSFQVPSDSGVALPGYWMLFVMNSAGVPSVASTINVTQGQTGHHHHHH

SEQ ID NO: 141 - DNA, 1953 bp, Artificial Sequence
  Engineered variant of Galactose Oxidase from Fusarium graminearum
atggcatcagcaccgatcggggtagccatcccgcgcaacaactgggccgttacatgcgattccgcccagagtgggaatgaatgcattaaggcaattgacggtaataaagacacgttttggcacactcaatatggtgtgaacggagatcccaaaccgccgcacaccatcacgatcgatatgaaaacagtacaaaacgtgaatggcctttctgtactgccacgtcaggatggcaatcagaatggatggatcggacgtcacgaggtgtatttaagttctgatggggtgaattggggatcgcctgtagcgtctgggtcctggtttgccgattccaccacaaagtactctaattttgagacacgtccggcccgttacgtgcgccttgtcgccattaccgaagccaatgggcaaccgtggacttcaattgccgagattaacgtatttcaggcgtctagttacactgccccgcagccggagttggggcgctggggcccgacaatcgatcttcccattgtgccatcggccgccgcaatcgagccaacgagcggtcgtgtcttgatgtggagctcttatcgtaacgatgcgtttcgtgactctcctggcggtattacactgacgagctcatgggaccctagcactggaattgtatccgatcgcactagtaccgttaccgggcacgacatgttttgccccggtatctcgatggacgggaacggtcagatcgtggtcagcggtggtaatgatgcaaagaaaacttccttatatgattcgagctcggactcttggattccgggcccggatatgcaggtcgcgcgtgggtataattcaagtgcgactatgagtgatgggcgcgtatttacgattggcggcagttttagtggcggtcaagttgagaagaacggggaggtttacgagccgagctcgaagacttggacttcgctgccgaatgcaaaagttaaccccatgctgaccgccgataaacggggtctgtaccgtagcgataatcatgcttggctgtttgggtggaaaaagggtagcgtcttccaagcaggtccaagtactgccatgaactggtattatacatctgggtcgggggacgttaagagtgcagggaagcgtcaatcagaccgcggagtagccccagacgccatgtgcggtaatgccgtaatgtacgacgcagtcaaaggcaaaattttgactttcgggggctcgcccgattatgagaattcagatgcgactacaaatgcccatattatcacgctgggcgagcctggcacgagtccgaatacggtatttgcgagtaatgggttactgttcgctcgtacctttcatacctcggtggtccttccggacgggagtgtattcatcacaggaggccagcagcgcgcggttccactggaagatagcacacccgtatttactccagagatctacgttcccgaacaagatactttttacaagcaaaacccgaatagtatcgttcgtgcctatcattcgatcagcttgttgctgccggacggacgtgttttcaatggtggcggtggcttatgcggcgattgtgagacgaaccactttgatgcgcaaatctttacgccgaattatctttacgatagcaacgggaacttagccactcgccctaaaatcacccgtacctcaacccagtcagtcaaggtcggcgggtggatcaccatttggactgacatgtcgatctcggccgcaagtttaattcgctacggaactgctactcacacggtgaacaccgatcagcgacgcatcggcttgacgttaacgaacaacggaggtaattcgtacagctttcaagttccgtcggacagcggggttgctcttccgggatactggatgttgttcgttatgaattccgctggtgtaccctccgttgcgtcgacgattcgtgttacccagggccaaactggccaccatcaccatcaccattag

SEQ ID NO: 142 - protein, 650 aa, Artificial Sequence
  Engineered variant of Galactose Oxidase from Fusarium graminearum
MASAPIGVAIPRNNWAVTCDSAQSGNECIKAIDGNKDTFWHTQYGVNGDPKPPHTITIDMKTVQNVNGLSVLPRQDGNQNGWIGRHEVYLSSDGVNWGSPVASGSWFADSTTKYSNFETRPARYVRLVAITEANGQPWTSIAEINVFQASSYTAPQPELGRWGPTIDLPIVPSAAAIEPTSGRVLMWSSYRNDAFRDSPGGITLTSSWDPSTGIVSDRTSTVTGHDMFCPGISMDGNGQIVVSGGNDAKKTSLYDSSSDSWIPGPDMQVARGYNSSATMSDGRVFTIGGSFSGGQVEKNGEVYEPSSKTWTSLPNAKVNPMLTADKRGLYRSDNHAWLFGWKKGSVFQAGPSTAMNWYYTSGSGDVKSAGKRQSDRGVAPDAMCGNAVMYDAVKGKILTFGGSPDYENSDATTNAHIITLGEPGTSPNTVFASNGLLFARTFHTSVVLPDGSVFITGGQQRAVPLEDSTPVFTPEIYVPEQDTFYKQNPNSIVRAYHSISLLLPDGRVFNGGGGLCGDCETNHFDAQIFTPNYLYDSNGNLATRPKITRTSTQSVKVGGWITIWTDMSISAASLIRYGTATHTVNTDQRRIGLTLTNNGGNSYSFQVPSDSGVALPGYWMLFVMNSAGVPSVASTIRVTQGQTGHHHHHH

SEQ ID NO: 143 - DNA, 1953 bp, Artificial Sequence
  Engineered variant of Galactose Oxidase from Fusarium graminearum
atggcatcagcaccgatcggggtagccatcccgcgcaacaactgggccgttacatgcgattccgcccagagtgggaatgaatgcattaaggcaattgacggtaataaagacacgttttggcacactcaatatggtgtgaacggagatcccaaaccgccgcacaccatcacgatcgatatgaaaacagtacaaaacgtgaatggcctttctgtactgccacgtcaggatggcaatcagaatggatggatcggacgtcacgaggtgtatttaagttctgatggggtgaattggggatcgcctgtagcgtctgggtcctggtttgccgattccaccacaaagtactctaattttgagacacgtccggcccgttacgtgcgccttgtcgccattaccgaagccaatgggcaaccgtggacttcaattgccgagattaacgtatttcaggcgtctagttacactgccccgcagccgggcttggggcgctggggcccgacaatcgatcttcccattgtgccatcggccgccgcaatcgagccaacgagcggtcgtgtcttgatgtggagctcttatcgtaacgatgcgtttcgtgactctcctggcggtattacactgacgagctcatgggaccctagcactggaattgtatccgatcgcactagtaccgttaccgggcacgacatgttttgccccggtatctcgatggacgggaacggtcagatcgtggtcagcggtggtaatgatgcaaagaaaacttccttatatgattcgagctcggactcttggattccgggcccggatatgcaggtcgcgcgtgggtataactcaagtgcgactatgagtgatgggcgcgtatttacgattggcggcagttttagtggcggtcaagttgagaagaacggggaggtttactcgccgagctcgaagacttggacttcgctgccgaatgcaaaagttaaccccatgctgaccgccgataaacggggtctgtaccgtagcgataatcatgcttggctgtttgggtggaaaaagggtagcgtcttccaagcaggtccaagtactgccatgaactggtattatacatctgggtcgggggacgttctgagtgcagggaagcgtcaatcagaccgcggagtagccccagacgccatgtgcggtaatgccgtaatgtacgacgcagtcaaaggcaaaattttgactttcgggggctcgcccgattatgagaattcagatgcgactacaaatgcccatattatcacgctgggcgagcctggcacgctgccgaatacggtatttgcgagtaatgggttatatttcgctcgtacctttcatacctcggtggtccttccggacgggagtgtattcatcacaggaggccagcagcgcgcggttccactggaagatagcacacccgtatttactccagagatctacgttcccgaacaagatactttttacaagcaaaacccgaatagtatcgttcgtgcctatcattcgatcagcttgttgctgccggacggacgtgttttcaatggtggcggtggcttatgcggcgattgtgagacgaaccactttgatgcgcaaatctttacgccgaattatctttacgatagcaacgggaacttagccactcgccctaaaatcacccgtacctcaacccagtcagtcaaggtcggcgggtggatcaccatttggactgacatgtcgatctcggccgcaagtttaattcgctacggaactgctactcacacggtgaacaccgatcagcgacgcatcggcttgacgttaacgaacaacggaggtaattcgtacagctttcaagttccgtcggacagcggggttgctcttccgggatactggatgttgttcgttatgaattccgctggtgtaccctccgttgcgtcgacgattaacgttacccagggccaaactggccaccatcaccatcaccattag

SEQ ID NO: 144 - protein, 650 aa, Artificial Sequence
  Engineered variant of Galactose Oxidase from Fusarium graminearum
MASAPIGVAIPRNNWAVTCDSAQSGNECIKAIDGNKDTFWHTQYGVNGDPKPPHTITIDMKTVQNVNGLSVLPRQDGNQNGWIGRHEVYLSSDGVNWGSPVASGSWFADSTTKYSNFETRPARYVRLVAITEANGQPWTSIAEINVFQASSYTAPQPGLGRWGPTIDLPIVPSAAAIEPTSGRVLMWSSYRNDAFRDSPGGITLTSSWDPSTGIVSDRTSTVTGHDMFCPGISMDGNGQIVVSGGNDAKKTSLYDSSSDSWIPGPDMQVARGYNSSATMSDGRVFTIGGSFSGGQVEKNGEVYSPSSKTWTSLPNAKVNPMLTADKRGLYRSDNHAWLFGWKKGSVFQAGPSTAMNWYYTSGSGDVLSAGKRQSDRGVAPDAMCGNAVMYDAVKGKILTFGGSPDYENSDATTNAHIITLGEPGTLPNTVFASNGLYFARTFHTSVVLPDGSVFITGGQQRAVPLEDSTPVFTPEIYVPEQDTFYKQNPNSIVRAYHSISLLLPDGRVFNGGGGLCGDCETNHFDAQIFTPNYLYDSNGNLATRPKITRTSTQSVKVGGWITIWTDMSISAASLIRYGTATHTVNTDQRRIGLTLTNNGGNSYSFQVPSDSGVALPGYWMLFVMNSAGVPSVASTINVTQGQTGHHHHHH

SEQ ID NO: 145 - DNA, 1953 bp, Artificial Sequence
  Engineered variant of Galactose Oxidase from Fusarium graminearum
atggcatcagcaccgatcggggtagccatcccgcgcaacaactgggccgttacatgcgattccgcccagagtgggaatgaatgcattaaggcaattgacggtaataaagacacgttttggcacactcaatatggtgtaaacggagatcccaaaccgccgcacaccatcacgatcgatatgaaaacagtacaaaacgtgaatggcctttctgtactgccacgtcaggatggcaatcagaatggatggatcggacgtcacgaggtgtatttaagttctgatggggtgaattggggatcgcctgtagcgtctgggtcctggtttgccgattccaccacaaagtactctaattttgagacacgtccggcccgttacgtgcgccttgtcgccattaccgaagccaatgggcaaccgtggacttcaattgccgagattaacgtatttcaggcgtctagttacactgccccgcagccgggcttggggcgctggggcccgacaatcgatcttcccattgtgccatcggccgccgcaatcgagccaacgagcggtcgtgtcttgatgtggagctcttatcgtaacgatgcgtttcgtgactctcctggcggtattacactgacgagctcatgggaccctagcactggaattgtatccgatcgcactagtaccgttaccgggcacgacatgttttgccccggtatctcgatggacgggaacggtcagatcgtggtcagcggtggtaatgatgcaaagaaaacttccttatatgattcgagctcggactcttggattccgggcccggatatgcaggtcgcgcgtgggtatcaatcaagtgcgactatgagtgatgggcgcgtatttacgattggcggcagttttagtggcggtcaagttgagaagaacggggaggtttactccccgagctcgaagacttggacttcgctgccgaatgcaaaagttaaccccatgctgaccgccgataaacggggtctgtaccgtagcgataatcatgcttggctgtttgggtggaaaaagggtagcgtcttccaagcaggtccaagtactgccatgaactggtattatacatctgggtcgggggacgttaagagtgcagggaagcgtcaatcaaaccgcggagtagccccagacgccatgtgcggtaatgccgtaatgtacgacgcagtcaaaggcaaaattttgactttcgggggctcgcccgattatgaggactcagatgcgactacaaatgcccatattatcacgctgggcgagcctggcacgagtccgaatacggtatttgcgagtaatgggttactgttcgctcgtacctttcatacctcggtggtccttccggacgggagtgtattcatcacaggaggccagcagcgcgcggttccactggaagatagcacacccgtatttactccagagatctacgttcccgaacaagatactttttacaagcaaaacccgaatagtatcgttcgtgcctatcattcgatcagcttgttgctgccggacggacgtgttttcaatggtggcggtggcttatgcggcgattgtgagacgaaccactttgatgcgcaaatctttacgccgaattatctttacgatagcaacgggaacttagccactcgccctaaaatcacccgtacctcaacccagtcagtcgtcgtcggcgggtggatcaccatttggactgacatgtcgatctcggccgcaagtttaattcgctacggaactgctactcacacggtgaacaccgatcagcgacgcatcggcttgacgttaacgaacaacggaggtaattcgtacagctttcaagttccgtcggacagcggggttgctcttccgggatactggatgttgttcgttatgaattccgctggtgtaccctccgttgcgtcgacgattaacgttacccagggccaaactggccaccatcaccatcaccattag

SEQ ID NO: 146 - protein, 650 aa, Artificial Sequence
  Engineered variant of Galactose Oxidase from Fusarium graminearum
MASAPIGVAIPRNNWAVTCDSAQSGNECIKAIDGNKDTFWHTQYGVNGDPKPPHTITIDMKTVQNVNGLSVLPRQDGNQNGWIGRHEVYLSSDGVNWGSPVASGSWFADSTTKYSNFETRPARYVRLVAITEANGQPWTSIAEINVFQASSYTAPQPGLGRWGPTIDLPIVPSAAAIEPTSGRVLMWSSYRNDAFRDSPGGITLTSSWDPSTGIVSDRTSTVTGHDMFCPGISMDGNGQIVVSGGNDAKKTSLYDSSSDSWIPGPDMQVARGYQSSATMSDGRVFTIGGSFSGGQVEKNGEVYSPSSKTWTSLPNAKVNPMLTADKRGLYRSDNHAWLFGWKKGSVFQAGPSTAMNWYYTSGSGDVKSAGKRQSNRGVAPDAMCGNAVMYDAVKGKILTFGGSPDYEDSDATTNAHIITLGEPGTSPNTVFASNGLLFARTFHTSVVLPDGSVFITGGQQRAVPLEDSTPVFTPEIYVPEQDTFYKQNPNSIVRAYHSISLLLPDGRVFNGGGGLCGDCETNHFDAQIFTPNYLYDSNGNLATRPKITRTSTQSVVVGGWITIWTDMSISAASLIRYGTATHTVNTDQRRIGLTLTNNGGNSYSFQVPSDSGVALPGYWMLFVMNSAGVPSVASTINVTQGQTGHHHHHH

SEQ ID NO: 147 - DNA, 1953 bp, Artificial Sequence
  Engineered variant of Galactose Oxidase from Fusarium graminearum
atggcatcagcaccgatcggggtagccatcccgcgcaacaactgggccgttacatgcgattccgcccagagtgggaatgaatgcattaaggcaattgacggtaataaagacacgttttggcacactcaatatggtgtgaacggagatcccaaaccgccgcacaccatcacgatcgatatgaaaacagtacaaaacgtgaatggcctttctgtactgccacgtcaggatggcaatcagaatggatggatcggacgtcacgaggtgtatttaagttctgatggggtgaattggggatcgcctgtagcgtctgggtcctggtttgccgattccaccacaaagtactctaattttgagacacgtccggcccgttacgtgcgccttgtcgccattaccgaagccaatgggcaaccgtggacttcaattgccgagattaacgtatttcaggcgtctagttacactgccccgcagccgggcttggggcgctggggcccgacaatcgatcttcccattgtgccatcggccgccgcaatcgagccaacgagcggtcgtgtcttgatgtggagctcttatcgtaacgatgcgtttcgtgactctcctggcggtattacactgacgagctcatgggaccctagcactggaattgtatccgaacgcactagtaccgttaccgggcacgacatgttttgccccggtatctcgatggacgggaacggtcagatcgtggtcagcggtggtaatgatgcaaagaaaacttccttatatgattcgagctcggactcttggattccgggcccggatatgcaggtcgcgcgtgggtataactcaagtgcgactatgagtgatgggcgcgtatttacgattggcggcagttttagtggcggtcaagttgagaagaacggggaggtttactcgccgagctcgaagacttggacttcgctgccgaatgcaaaagttaaccccatgctgaccgccgataaacggggtctgtaccgtagcgataatcatgcttggctgtttgggtggaaaaagggtagcgtcttccaagcaggtccaagtactgccatgaactggtattatacatctgggtcgggggacgttctgagtgcagggaagcgtcaatcaaaccgcggagtagccccagacgccatgtgcggtaatgccgtaatgtacgacgcagtcaaaggcaaaattttgactttcgggggctcgcccgattatgaggactcagatgcgactacaaatgcccatattatcacgctgggcgagcctggcacgagtccgaatacggtatttgcgagtaatgggttactgttcgctcgtacctttcatacctcggtggtccttccggacgggagtgtattcatcacaggaggccagcagcgcgcggttccactggaagatagcacacccgtatttactccagagatctacgttcccgaacaagatactttttacaagcaaaacccgaatagtatcgttcgtgcctatcattcgatcagcttgttgctgccggacggacgtgttttcaatggtggcggtggcttatgcggcgattgtgagacgaaccactttgatgcgcaaatctttacgccgaattatctttacgatagcaacgggaacttagccactcgccctaaaatcacccgtacctcaacccagtcagtcaaggtcggcgggtggatcaccatttggactgacatgtcgatctcggccgcaagtttaattcgctacggaactgctactcacacggtgaacaccgatcagcgacgcatcggcttgacgttaacgaacaacggaggtaattcgtacagctttcaagttccgtcggacagcggggttgctcttccgggatactggatgttgttcgttatgaattccgctggtgtaccctccgttgcgtcgacgattaatgttacccagggccaaactggccaccatcaccatcaccattag

SEQ ID NO: 148 - protein, 650 aa, Artificial Sequence
  Engineered variant of Galactose Oxidase from Fusarium graminearum
MASAPIGVAIPRNNWAVTCDSAQSGNECIKAIDGNKDTFWHTQYGVNGDPKPPHTITIDMKTVQNVNGLSVLPRQDGNQNGWIGRHEVYLSSDGVNWGSPVASGSWFADSTTKYSNFETRPARYVRLVAITEANGQPWTSIAEINVFQASSYTAPQPGLGRWGPTIDLPIVPSAAAIEPTSGRVLMWSSYRNDAFRDSPGGITLTSSWDPSTGIVSERTSTVTGHDMFCPGISMDGNGQIVVSGGNDAKKTSLYDSSSDSWIPGPDMQVARGYNSSATMSDGRVFTIGGSFSGGQVEKNGEVYSPSSKTWTSLPNAKVNPMLTADKRGLYRSDNHAWLFGWKKGSVFQAGPSTAMNWYYTSGSGDVLSAGKRQSNRGVAPDAMCGNAVMYDAVKGKILTFGGSPDYEDSDATTNAHIITLGEPGTSPNTVFASNGLLFARTFHTSVVLPDGSVFITGGQQRAVPLEDSTPVFTPEIYVPEQDTFYKQNPNSIVRAYHSISLLLPDGRVFNGGGGLCGDCETNHFDAQIFTPNYLYDSNGNLATRPKITRTSTQSVKVGGWITIWTDMSISAASLIRYGTATHTVNTDQRRIGLTLTNNGGNSYSFQVPSDSGVALPGYWMLFVMNSAGVPSVASTINVTQGQTGHHHHHH

SEQ ID NO: 149 - DNA, 1953 bp, Artificial Sequence
  Engineered variant of Galactose Oxidase from Fusarium graminearum
atggcatcagcaccgatcggggtagccatcccgcgcaacaactgggccgttacatgcgattccgcccagagtgggaatgaatgcattaaggcaattgacggtaataaagacacgttttggcacactcaatatggtgctaacggagatcccaaaccgccgcacaccatcacgatcgatatgaaaacagtacaaaacgtgaatggcctttctgtactgccacgtcaggatggcaatcagaatggatggatcggacgtcacgaggtgtatttaagttctgatggggtgaattggggatcgcctgtagcgtctgggtcctggtttgccgattccaccacaaagtactctaattttgagacacgtccggcccgttacgtgcgccttgtcgccattaccgaagccaatgggcaaccgtggacttcaattgccgagattaacgtatttcaggcgtctagttacactgccccgcagccgggcttggggcgctggggcccgacaatcgatcttcccattgtgccatcggccgccgcaatcgagccaacgagcggtcgtgtcttgatgtggagctcttatcgtaacgatgcgtttcgtgactctcctggcggtattacactgacgagctcatgggaccctagcactggaattgtatccgatcgcactagtaccgttaccgggcacgacatgttttgccccggtatctcgatggacgggaacggtcagatcgtggtcagcggtggtaatgatgcaaagaaaacttccttatatgattcgagctcggactcttggattccgggcccggatatgcaggtcgcgcgtgggtataattcaagtgcgactatgagtgatgggcgcgtatttacgattggcggcagttttagtggcggtcaagttgagaagaacggggaggtttactcgccgagctcgaagacttggacttcgctgccgaatgcaaaagttaaccccatgctgaccgccgataaacggggtctgtaccgtagcgataatcatgcttggctgtttgggtggaaaaagggtagcgtcttccaagcaggtccaagtactgccatgaactggtattatacatctgggtcgggggacgttctgagtgcagggaagcgtcaatcagaccgcggagtagccccagacgccatgtgcggtaatgccgtaatgtacgacgcagtcaaaggcaaaattttgactttcgggggctcgcccgattatgaggactcagatgcgactacaaatgcccatattatcacgctgggcgagcctggcacgagtccgaatacggtatttgcgagtaatgggttactgttcgctcgtacctttcatacctcggtggtccttccggacgggagtgtattcatcacaggaggccagcagcgcgcggttccactggaagatagcacacccgtatttactccagagatctacgttcccgaacaagatactttttacaagcaaaacccgaatagtatcgttcgtgcctatcattcgatcagcttgttgctgccggacggacgtgttttcaatggtggcggtggcttatgcggcgattgtgagacgaaccactttgatgcgcaaatctttacgccgaattatctttacgatagcaacgggaacttagccactcgccctaaaatcacccgtacctcaacccagtcagtcaaggtcggcgggtggatcaccatttggactgacatgtcgatctcggccgcaagtttaattcgctacggaactgctactcacacggtgaacaccgatcagcgacgcatcggcttgacgttaacgaacaacggaggtaattcgtacagctttcaagttccgtcggacagcggggttgctcttccgggatactggatgttgttcgttatgaattccgctggtgtaccctccgttgcgtcgacgattaatgttacccagggccaaactggccaccatcaccatcaccattag

SEQ ID NO: 150 - protein, 650 aa, Artificial Sequence
  Engineered variant of Galactose Oxidase from Fusarium graminearum
MASAPIGVAIPRNNWAVTCDSAQSGNECIKAIDGNKDTFWHTQYGANGDPKPPHTITIDMKTVQNVNGLSVLPRQDGNQNGWIGRHEVYLSSDGVNWGSPVASGSWFADSTTKYSNFETRPARYVRLVAITEANGQPWTSIAEINVFQASSYTAPQPGLGRWGPTIDLPIVPSAAAIEPTSGRVLMWSSYRNDAFRDSPGGITLTSSWDPSTGIVSDRTSTVTGHDMFCPGISMDGNGQIVVSGGNDAKKTSLYDSSSDSWIPGPDMQVARGYNSSATMSDGRVFTIGGSFSGGQVEKNGEVYSPSSKTWTSLPNAKVNPMLTADKRGLYRSDNHAWLFGWKKGSVFQAGPSTAMNWYYTSGSGDVLSAGKRQSDRGVAPDAMCGNAVMYDAVKGKILTFGGSPDYEDSDATTNAHIITLGEPGTSPNTVFASNGLLFARTFHTSVVLPDGSVFITGGQQRAVPLEDSTPVFTPEIYVPEQDTFYKQNPNSIVRAYHSISLLLPDGRVFNGGGGLCGDCETNHFDAQIFTPNYLYDSNGNLATRPKITRTSTQSVKVGGWITIWTDMSISAASLIRYGTATHTVNTDQRRIGLTLTNNGGNSYSFQVPSDSGVALPGYWMLFVMNSAGVPSVASTINVTQGQTGHHHHHH

SEQ ID NO: 151 - DNA, 1953 bp, Artificial Sequence
  Engineered variant of Galactose Oxidase from Fusarium graminearum
atggcatcagcaccgatcggggtagccatcccgcgcaacaactgggccgttacatgcgattccgcccagagtgggaatgaatgcattaaggcaattgacggtaataaagacacgttttggcacactcaatatggtgctaacggagatcccaaaccgccgcacaccatcacgatcgatatgaaaacagtacaaaacgtgaatggcctttctgtactgccacgtcaggatggcaatcagaatggatggatcggacgtcacgaggtgtatttaagttctgatggggtgaattggggatcgcctgtagcgtctgggtcctggtttgccgattccaccacaaagtactctaattttgagacacgtccggcccgttacgtgcgccttgtcgccattaccgaagccaatgggcaaccgtggacttcaattgccgagattaacgtatttcaggcgtctagttacactgccccgcagccggggttggggcgctggggcccgacaatcgatcttcccattgtgccatcggccgccgcaatcgagccaacgagcggtcgtgtcttgatgtggagctcttatcgtaacgatgcgtttcgtgactctcctggcggtattacactgacgagctcatgggaccctagcactggaattgtatccgaacgcactagtaccgttaccgggcacgacatgttttgccccggtatctcgatggacgggaacggtcagatcgtggtcagcggtggtaatgatgcaaagaaaacttccttatatgattcgagctcggactcttggattccgggcccggatatgcaggtcgcgcgtgggtatcaatcaagtgcgactatgagtgatgggcgcgtatttacgattggcggcagttttagtggcggtcaagttgagaagaacggggaggtttactccccgagctcgaagacttggacttcgctgccgaatgcaaaagttaaccccatgctgaccgccgataaacggggtctgtaccgtagcgataatcatgcttggctgtttgggtggaaaaagggtagcgtcttccaagcaggtccaagtactgccatgaactggtattatacatctgggtcgggggacgttaagagtgcagggaagcgtcaatcagaccgcggagtagccccagacgccatgtgcggtaatgccgtaatgtacgacgcagtcaaaggcaaaattttgactttcgggggctcgcccgattatgaggactcagatgcgactacaaatgcccatattatcacgctgggcgagcctggcacgagtccgaatacggtatttgcgagtaatgggttactgttcgctcgtacctttcatacctcggtggtccttccggacgggagtgtattcatcacaggaggccagcagcgcgcggttccactggaagatagcacacccgtatttactccagagatctacgttcccgaacaagatactttttacaagcaaaacccgaatagtatcgttcgtgcctatcattcgatcagcttgttgctgccggacggacgtgttttcaatggtggcggtggcttatgcggcgattgtgagacgaaccactttgatgcgcaaatctttacgccgaattatctttacgatagcaacgggaacttagccactcgccctaaaatcacccgtacctcaacccagtcagtcaaggtcggcgggtggatcaccatttggactgacatgtcgatctcggccgcaagtttaattcgctacggaactgctactcacacggtgaacaccgatcagcgacgcatcggcttgacgttaacgaacaacggaggtaattcgtacagctttcaagttccgtcggacagcggggttgctcttccgggatactggatgttgttcgttatgaattccgctggtgtaccctccgttgcgtcgacgattaacgttacccagggccaaactggccaccatcaccatcaccattag

SEQ ID NO: 152 - protein, 650 aa, Artificial Sequence
  Engineered variant of Galactose Oxidase from Fusarium graminearum
MASAPIGVAIPRNNWAVTCDSAQSGNECIKAIDGNKDTFWHTQYGANGDPKPPHTITIDMKTVQNVNGLSVLPRQDGNQNGWIGRHEVYLSSDGVNWGSPVASGSWFADSTTKYSNFETRPARYVRLVAITEANGQPWTSIAEINVFQASSYTAPQPGLGRWGPTIDLPIVPSAAAIEPTSGRVLMWSSYRNDAFRDSPGGITLTSSWDPSTGIVSERTSTVTGHDMFCPGISMDGNGQIVVSGGNDAKKTSLYDSSSDSWIPGPDMQVARGYQSSATMSDGRVFTIGGSFSGGQVEKNGEVYSPSSKTWTSLPNAKVNPMLTADKRGLYRSDNHAWLFGWKKGSVFQAGPSTAMNWYYTSGSGDVKSAGKRQSDRGVAPDAMCGNAVMYDAVKGKILTFGGSPDYEDSDATTNAHIITLGEPGTSPNTVFASNGLLFARTFHTSVVLPDGSVFITGGQQRAVPLEDSTPVFTPEIYVPEQDTFYKQNPNSIVRAYHSISLLLPDGRVFNGGGGLCGDCETNHFDAQIFTPNYLYDSNGNLATRPKITRTSTQSVKVGGWITIWTDMSISAASLIRYGTATHTVNTDQRRIGLTLTNNGGNSYSFQVPSDSGVALPGYWMLFVMNSAGVPSVASTINVTQGQTGHHHHHH

SEQ ID NO: 153 - DNA, 1953 bp, Artificial Sequence
  Engineered variant of Galactose Oxidase from Fusarium graminearum
atggcatcagcaccgatcggggtagccatcccgcgcaacaactgggccgttacatgcgattccgcccagagtgggaatgaatgcattaaggcaattgacggtaataaagacacgttttggcacactcaatatggtgtgaacggagatcccaaaccgccgcacaccatcacgatcgatatgaaaacagtacaaaacgtgaatggcctttctgtactgccacgtcaggatggcaatcagaatggatggatcggacgtcacgaggtgtatttaagttctgatggggtgaattggggatcgcctgtagcgtctgggtcctggtttgccgattccaccacaaagtactctaattttgagacacgtccggcccgttacgtgcgccttgtcgccattaccgaagccaatgggcaaccgtggacttcaattgccgagattaacgtatttcaggcgtctagttacactgccccgcagccgggcttggggcgctggggcccgacaatcgatcttcccattgtgccatcggccgccgcaatcgagccaacgagcggtcgtgtcttgatgtggagctcttatcgtaacgatgcgtttcgtgactctcctggcggtattacactgacgagctcatgggaccctagcactggaattgtatccgatcgcactagtaccgttaccgggcacgacatgttttgccccggtatctcgatggacgggaacggtcagatcgtggtcagcggtggtaatgatgcaaagaaaacttccttatatgattcgagctcggactcttggattccgggcccggatatgcaggtcgcgcgtgggtataattcaagtgcgactatgagtgatgggcgcgtatttacgattggcggcagttttagtggcggtcaagttgagaagaacggggaggtttactccccgagctcgaagacttggacttcgctgccgaatgcaaaagttaaccccatgctgaccgccgataaacggggtctgtaccgtagcgataatcatgcttggctgtttgggtggaaaaagggtagcgtcttccaagcaggtccaagtactgccatgaactggtattatacatctgggtcgggggacgttctgagtgcagggaagcgtcaatcagaccgcggagtagccccagacgccatgtgcggtaatgccgtaatgtacgacgcagtcaaaggcaaaattttgactttcgggggctcgcccgattatgaggactcagatgcgactacaaatgcccatattatcacgctgggcgagcctggcacgagtccgaatacggtatttgcgagtaatgggttactgttcgctcgtacctttcatacctcggtggtccttccggacgggagtgtattcatcacaggaggccagcagcgcgcggttccactggaagatagcacacccgtatttactccagagatctacgttcccgaacaagatactttttacaagcaaaacccgaatagtatcgttcgtgcctatcattcgatcagcttgttgctgccggacggacgtgttttcaatggtggcggtggcttatgcggcgattgtgagacgaaccactttgatgcgcaaatctttacgccgaattatctttacgatagcaacgggaacttagccactcgccctaaaatcacccgtacctcaacccagtcagtcgtcgtcggcgggtggatcaccatttggactgacatgtcgatctcggccgcaagtttaattcgctacggaactgctactcacacggtgaacaccgatcagcgacgcatcggcttgacgttaacgaacaacggaggtaattcgtacagctttcaagttccgtcggacagcggggttgctcttccgggatactggatgttgttcgttatgaattccgctggtgtaccctccgttgcgtcgacgattaacgttacccagggccaaactggccaccatcaccatcaccattag

SEQ ID NO: 154 - protein, 650 aa, Artificial Sequence
  Engineered variant of Galactose Oxidase from Fusarium graminearum
MASAPIGVAIPRNNWAVTCDSAQSGNECIKAIDGNKDTFWHTQYGVNGDPKPPHTITIDMKTVQNVNGLSVLPRQDGNQNGWIGRHEVYLSSDGVNWGSPVASGSWFADSTTKYSNFETRPARYVRLVAITEANGQPWTSIAEINVFQASSYTAPQPGLGRWGPTIDLPIVPSAAAIEPTSGRVLMWSSYRNDAFRDSPGGITLTSSWDPSTGIVSDRTSTVTGHDMFCPGISMDGNGQIVVSGGNDAKKTSLYDSSSDSWIPGPDMQVARGYNSSATMSDGRVFTIGGSFSGGQVEKNGEVYSPSSKTWTSLPNAKVNPMLTADKRGLYRSDNHAWLFGWKKGSVFQAGPSTAMNWYYTSGSGDVLSAGKRQSDRGVAPDAMCGNAVMYDAVKGKILTFGGSPDYEDSDATTNAHIITLGEPGTSPNTVFASNGLLFARTFHTSVVLPDGSVFITGGQQRAVPLEDSTPVFTPEIYVPEQDTFYKQNPNSIVRAYHSISLLLPDGRVFNGGGGLCGDCETNHFDAQIFTPNYLYDSNGNLATRPKITRTSTQSVVVGGWITIWTDMSISAASLIRYGTATHTVNTDQRRIGLTLTNNGGNSYSFQVPSDSGVALPGYWMLFVMNSAGVPSVASTINVTQGQTGHHHHHH

SEQ ID NO: 155 - DNA, 1953 bp, Artificial Sequence
  Engineered variant of Galactose Oxidase from Fusarium graminearum
atggcatcagcaccgatcggggtagccatcccgcgcaacaactgggccgttacatgcgattccgcccagagtgggaatgaatgcattaaggcaattgacggtaataaagacacgttttggcacactcaatatggtgtgaacggagatcccaaaccgccgcacaccatcacgatcgatatgaaaacagtacaaaacgtgaatggcctttctgtactgccacgtcaggatggcaatcagaatggatggatcggacgtcacgaggtgtatttaagttctgatggggtgaattggggatcgcctgtagcgtctgggtcctggtttgccgattccaccacaaagtactctaattttgagacacgtccggcccgttacgtgcgccttgtcgccattaccgaagccaatgggcaaccgtggacttcaattgccgagattaacgtatttcaggcgtctagttacactgccccgcagccggggttggggcgctggggcccgacaatcgatcttcccattgtgccatcggccgccgcaatcgagccaacgagcggtcgtgtcttgatgtggagctcttatcgtaacgatgcgtttcgtgactctcctggcggtattacactgacgagctcatgggaccctagcactggaattgtatccgatcgcactagtaccgttaccgggcacgacatgttttgccccggtatctcgatggacgggaacggtcagatcgtggtcagcggtggtaatgatgcaaagaaaacttccttatatgattcgagctcggactcttggattccgggcccggatatgcaggtcgcgcgtgggtatcaatcaagtgcgactatgagtgatgggcgcgtatttacgattggcggcagttttagtggcggtcaagttgagaagaacggggaggtttactcgccgagctcgaagacttggacttcgctgccgaatgcaaaagttaaccccatgctgaccgccgataaacggggtctgtaccgtagcgataatcatgcttggctgtttgggtggaaaaagggtagcgtcttccaagcaggtccaagtactgccatgaactggtattatacatctgggtcgggggacgttctgagtgcagggaagcgtcaatcagaccgcggagtagccccagacgccatgtgcggtaatgccgtaatgtacgacgcagtcaaaggcaaaattttgactttcgggggctcgcccgattatgaggactcagatgcgactacaaatgcccatattatcacgctgggcgagcctggcacgagtccgaatacggtatttgcgagtaatgggttactgttcgctcgtacctttcatacctcggtggtccttccggacgggagtgtattcatcacaggaggccagcagcgcgcggttccactggaagatagcacacccgtatttactccagagatctacgttcccgaacaagatactttttacaagcaaaacccgaatagtatcgttcgtgcctatcattcgatcagcttgttgctgccggacggacgtgttttcaatggtggcggtggcttatgcggcgattgtgagacgaaccactttgatgcgcaaatctttacgccgaattatctttacgatagcaacgggaacttagccactcgccctaaaatcacccgtacctcaacccagtcagtcgtggtcggcgggtggatcaccatttggactgacatgtcgatctcggccgcaagtttaattcgctacggaactgctactcacacggtgaacaccgatcagcgacgcatcggcttgacgttaacgaacaacggaggtaattcgtacagctttcaagttccgtcggacagcggggttgctcttccgggatactggatgttgttcgttatgaattccgctggtgtaccctccgttgcgtcgacgattcgtgttacccagggccaaactggccaccatcaccatcaccattag

SEQ ID NO: 156 - protein, 650 aa, Artificial Sequence
  Engineered variant of Galactose Oxidase from Fusarium graminearum
MASAPIGVAIPRNNWAVTCDSAQSGNECIKAIDGNKDTFWHTQYGVNGDPKPPHTITIDMKTVQNVNGLSVLPRQDGNQNGWIGRHEVYLSSDGVNWGSPVASGSWFADSTTKYSNFETRPARYVRLVAITEANGQPWTSIAEINVFQASSYTAPQPGLGRWGPTIDLPIVPSAAAIEPTSGRVLMWSSYRNDAFRDSPGGITLTSSWDPSTGIVSDRTSTVTGHDMFCPGISMDGNGQIVVSGGNDAKKTSLYDSSSDSWIPGPDMQVARGYQSSATMSDGRVFTIGGSFSGGQVEKNGEVYSPSSKTWTSLPNAKVNPMLTADKRGLYRSDNHAWLFGWKKGSVFQAGPSTAMNWYYTSGSGDVLSAGKRQSDRGVAPDAMCGNAVMYDAVKGKILTFGGSPDYEDSDATTNAHIITLGEPGTSPNTVFASNGLLFARTFHTSVVLPDGSVFITGGQQRAVPLEDSTPVFTPEIYVPEQDTFYKQNPNSIVRAYHSISLLLPDGRVFNGGGGLCGDCETNHFDAQIFTPNYLYDSNGNLATRPKITRTSTQSVVVGGWITIWTDMSISAASLIRYGTATHTVNTDQRRIGLTLTNNGGNSYSFQVPSDSGVALPGYWMLFVMNSAGVPSVASTIRVTQGQTGHHHHHH

SEQ ID NO: 157 - DNA, 1953 bp, Artificial Sequence
  Engineered variant of Galactose Oxidase from Fusarium graminearum
atggcatcagcaccgatcggggtagccatcccgcgcaacaactgggccgttacatgcgattccgcccagagtgggaatgaatgcattaaggcaattgacggtaataaagacacgttttggcacactcaatatggtgtaaacggagatcccaaaccgccgcacaccatcacgatcgatatgaaaacagtacaaaacgtgaatggcctttctgtactgccacgtcaggatggcaatcagaatggatggatcggacgtcacgaggtgtatttaagttctgatggggtgaattggggatcgcctgtagcgtctgggtcctggtttgccgattccaccacaaagtactctaattttgagacacgtccggcccgttacgtgcgccttgtcgccattaccgaagccaatgggcaaccgtggacttcaattgccgagattaacgtatttcaggcgtctagttacactgccccgcagccggggttggggcgctggggcccgacaatcgatcttcccattgtgccatcggccgccgcaatcgagccaacgagcggtcgtgtcttgatgtggagctcttatcgtaacgatgcgtttcgtgactctcctggcggtattacactgacgagctcatgggaccctagcactggaattgtatccgatcgcactagtaccgttaccgggcacgacatgttttgccccggtatctcgatggacgggaacggtcagatcgtggtcagcggtggtaatgatgcaaagaaaacttccttatatgattcgagctcggactcttggattccgggcccggatatgcaggtcgcgcgtgggtataattcaagtgcgactatgagtgatgggcgcgtatttacgattggcggcagttttagtggcggtcaagttgagaagaacggggaggtttactcgccgagctcgaagacttggacttcgctgccgaatgcaaaagttaaccccatgctgaccgccgataaacggggtctgtaccgtagcgataatcatgcttggctgtttgggtggaaaaagggtagcgtcttccaagcaggtccaagtactgccatgaactggtattatacatctgggtcgggggacgttaagagtgcagggaagcgtcaatcagaccgcggagtagccccagacgccatgtgcggtaatgccgtaatgtacgacgcagtcaaaggcaaaattttgactttcgggggctcgcccgattatgaggactcagatgcgactacaaatgcccatattatcacgctgggcgagcctggcacgagtccgaatacggtatttgcgagtaatgggttactgttcgctcgtacctttcatacctcggtggtccttccggacgggagtgtattcatcacaggaggccagcagcgcgcggttccactggaagatagcacacccgtatttactccagagatctacgttcccgaacaagatactttttacaagcaaaacccgaatagtatcgttcgtgcctatcattcgatcagcttgttgctgccggacggacgtgttttcaatggtggcggtggcttatgcggcgattgtgagacgaaccactttgatgcgcaaatctttacgccgaattatctttacgatagcaacgggaacttagccactcgccctaaaatcacccgtacctcaacccagtcagtcgtggtcggcgggtggatcaccatttggactgacatgtcgatctcggccgcaagtttaattcgctacggaactgctactcacacggtgaacaccgatcagcgacgcatcggcttgacgttaacgaacaacggaggtaattcgtacagctttcaagttccgtcggacagcggggttgctcttccgggatactggatgttgttcgttatgaattccgctggtgtaccctccgttgcgtcgacgattcgtgttacccagggccaaactggccaccatcaccatcaccattag

SEQ ID NO: 158 - protein, 650 aa, Artificial Sequence
  Engineered variant of Galactose Oxidase from Fusarium graminearum
MASAPIGVAIPRNNWAVTCDSAQSGNECIKAIDGNKDTFWHTQYGVNGDPKPPHTITIDMKTVQNVNGLSVLPRQDGNQNGWIGRHEVYLSSDGVNWGSPVASGSWFADSTTKYSNFETRPARYVRLVAITEANGQPWTSIAEINVFQASSYTAPQPGLGRWGPTIDLPIVPSAAAIEPTSGRVLMWSSYRNDAFRDSPGGITLTSSWDPSTGIVSDRTSTVTGHDMFCPGISMDGNGQIVVSGGNDAKKTSLYDSSSDSWIPGPDMQVARGYNSSATMSDGRVFTIGGSFSGGQVEKNGEVYSPSSKTWTSLPNAKVNPMLTADKRGLYRSDNHAWLFGWKKGSVFQAGPSTAMNWYYTSGSGDVKSAGKRQSDRGVAPDAMCGNAVMYDAVKGKILTFGGSPDYEDSDATTNAHIITLGEPGTSPNTVFASNGLLFARTFHTSVVLPDGSVFITGGQQRAVPLEDSTPVFTPEIYVPEQDTFYKQNPNSIVRAYHSISLLLPDGRVFNGGGGLCGDCETNHFDAQIFTPNYLYDSNGNLATRPKITRTSTQSVVVGGWITIWTDMSISAASLIRYGTATHTVNTDQRRIGLTLTNNGGNSYSFQVPSDSGVALPGYWMLFVMNSAGVPSVASTIRVTQGQTGHHHHHH

SEQ ID NO: 159 - DNA, 1953 bp, Artificial Sequence
  Engineered variant of Galactose Oxidase from Fusarium graminearum
atggcatcagcaccgatcggggtagccatcccgcgcaacaactgggccgttacatgcgattccgcccagagtgggaatgaatgcattaaggcaattgacggtaataaagacacgttttggcacactcaatatggtactaacggagatcccaaaccgccgcacaccatcacgatcgatatgaaaacagtacaaaacgtgaatggcctttctgtactgccacgtcaggatggcaatcagaatggatggatcggacgtcacgaggtgtatttaagttctgatggggtgaattggggatcgcctgtagcgtctgggtcctggtttgccgattccaccacaaagtactctaattttgagacacgtccggcccgttacgtgcgccttgtcgccattaccgaagccaatgggcaaccgtggacttcaattgccgagattaacgtatttcaggcgtctagttacactgccccgcagccgggcttggggcgctggggcccgacaatcgatcttcccattgtgccatcggccgccgcaatcgagccaacgagcggtcgtgtcttgatgtggagctcttatcgtaacgatgcgtttcgtgactctcctggcggtattacactgacgagctcatgggaccctagcactggaattgtatccgatcgcactagtaccgttaccgggcacgacatgttttgccccggtatctcgatggacgggaacggtcagatcgtggtcagcggtggtaatgatgcaaagaaaacttccttatatgattcgagctcggactcttggattccgggcccggatatgcaggtcgcgcgtgggtataattcaagtgcgactatgagtgatgggcgcgtatttacgattggcggcagttttagtggcggtcaagttgagaagaacggggaggtttactcgccgagctcgaagacttggacttcgctgccgaatgcaaaagttaaccccatgctgaccgccgataaacggggtctgtaccgtagcgataatcatgcttggctgtttgggtggaaaaagggtagcgtcttccaagcaggtccaagtactgccatgaactggtattatacatctgggtcgggggacgttctgagtgcagggaagcgtcaatcagaccgcggagtagccccagacgccatgtgcggtaatgccgtaatgtacgacgcagtcaaaggcaaaattttgactttcgggggctcgcccgattatgagaattcagatgcgactacaaatgcccatattatcacgctgggcgagcctggcacgagtccgaatacggtatttgcgagtaatgggttactgttcgctcgtacctttcatacctcggtggtccttccggacgggagtgtattcatcacaggaggccagcagcgcgcggttccactggaagatagcacacccgtatttactccagagatctacgttcccgaacaagatactttttacaagcaaaacccgaatagtatcgttcgtgcctatcattcgatcagcttgttgctgccggacggacgtgttttcaatggtggcggtggcttatgcggcgattgtgagacgaaccactttgatgcgcaaatctttacgccgaattatctttacgatagcaacgggaacttagccactcgccctaaaatcacccgtacctcaacccagtcagtcgtcgtcggcgggtggatcaccatttggactgacatgtcgatctcggccgcaagtttaattcgctacggaactgctactcacacggtgaacaccgatcagcgacgcatcggcttgacgttaacgaacaacggaggtaattcgtacagctttcaagttccgtcggacagcggggttgctcttccgggatactggatgttgttcgttatgaattccgctggtgtaccctccgttgcgtcgacgattaacgttacccagggccaaactggccaccatcaccatcaccattag

SEQ ID NO: 160 - protein, 650 aa, Artificial Sequence
  Engineered variant of Galactose Oxidase from Fusarium graminearum
MASAPIGVAIPRNNWAVTCDSAQSGNECIKAIDGNKDTFWHTQYGTNGDPKPPHTITIDMKTVQNVNGLSVLPRQDGNQNGWIGRHEVYLSSDGVNWGSPVASGSWFADSTTKYSNFETRPARYVRLVAITEANGQPWTSIAEINVFQASSYTAPQPGLGRWGPTIDLPIVPSAAAIEPTSGRVLMWSSYRNDAFRDSPGGITLTSSWDPSTGIVSDRTSTVTGHDMFCPGISMDGNGQIVVSGGNDAKKTSLYDSSSDSWIPGPDMQVARGYNSSATMSDGRVFTIGGSFSGGQVEKNGEVYSPSSKTWTSLPNAKVNPMLTADKRGLYRSDNHAWLFGWKKGSVFQAGPSTAMNWYYTSGSGDVLSAGKRQSDRGVAPDAMCGNAVMYDAVKGKILTFGGSPDYENSDATTNAHIITLGEPGTSPNTVFASNGLLFARTFHTSVVLPDGSVFITGGQQRAVPLEDSTPVFTPEIYVPEQDTFYKQNPNSIVRAYHSISLLLPDGRVFNGGGGLCGDCETNHFDAQIFTPNYLYDSNGNLATRPKITRTSTQSVVVGGWITIWTDMSISAASLIRYGTATHTVNTDQRRIGLTLTNNGGNSYSFQVPSDSGVALPGYWMLFVMNSAGVPSVASTINVTQGQTGHHHHHH

SEQ ID NO: 161 - DNA, 1953 bp, Artificial Sequence
  Engineered variant of Galactose Oxidase from Fusarium graminearum
atggcatcagcaccgatcggggtagccatcccgcgcaacaactgggccgttacatgcgattccgcccagagtgggaatgaatgcattaaggcaattgacggtaataaagacacgttttggcacactcaatatggtgtgaacggagatcccaaaccgccgcacaccatcacgatcgatatgaaaacagtacaaaacgtgaatggcctttctgtactgccacgtcaggatggcaatcagaatggatggatcggacgtcacgaggtgtatttaagttctgatggggtgaattggggatcgcctgtagcgtctgggtcctggtttgccgattccaccacaaagtactctaattttgagacacgtccggcccgttacgtgcgccttgtcgccattaccgaagccaatgggcaaccgtggacttcaattgccgagattaacgtatttcaggcgtctagttacactgccccgcagccgggcttggggcgctggggcccgacaatcgatcttcccattgtgccatcggccgccgcaatcgagccaacgagcggtcgtgtcttgatgtggagctcttatcgtaacgatgcgtttcgtgactctcctggcggtattacactgacgagctcatgggaccctagcactggaattgtatccgatcgcactagtaccgttaccgggcacgacatgttttgccccggtatctcgatggacgggaacggtcagatcgtggtcagcggtggtaatgatgcaaagaaaacttccttatatgattcgagctcggactcttggattccgggcccggatatgcaggtcgcgcgtgggtataactcaagtgcgactatgagtgatgggcgcgtatttacgattggcggcagttttagtggcggtcaagttgagaagaacggggaggtttacgagccgagctcgaagacttggacttcgctgccgaatgcaaaagttaaccccatgctgaccgccgataaacggggtctgtaccgtagcgataatcatgcttggctgtttgggtggaaaaagggtagcgtcttccaagcaggtccaagtactgccatgaactggtattatacatctgggtcgggggacgttaagagtgcagggaagcgtcaatcagaccgcggagtagccccagacgccatgtgcggtaatgccgtaatgtacgacgcagtcaaaggcaaaattttgactttcgggggctcgcccgattatgaggactcagatgcgactacaaatgcccatattatcacgctgggcgagcctggcacgagtccgaatacggtatttgcgagtaatgggttactgttcgctcgtacctttcatacctcggtggtccttccggacgggagtgtattcatcacaggaggccagcagcgcgcggttccactggaagatagcacacccgtatttactccagagatctacgttcccgaacaagatactttttacaagcaaaacccgaatagtatcgttcgtgcctatcattcgatcagcttgttgctgccggacggacgtgttttcaatggtggcggtggcttatgcggcgattgtgagacgaaccactttgatgcgcaaatctttacgccgaattatctttacgatagcaacgggaacttagccactcgccctaaaatcacccgtacctcaacccagtcagtcgtggtcggcgggtggatcaccatttggactgacatgtcgatctcggccgcaagtttaattcgctacggaactgctactcacacggtgaacaccgatcagcgacgcatcggcttgacgttaacgaacaacggaggtaattcgtacagctttcaagttccgtcggacagcggggttgctcttccgggatactggatgttgttcgttatgaattccgctggtgtaccctccgttgcgtcgacgattaacgttacccagggccaaactggccaccatcaccatcaccattag

SEQ ID NO: 162 - protein, 650 aa, Artificial Sequence
  Engineered variant of Galactose Oxidase from Fusarium graminearum
MASAPIGVAIPRNNWAVTCDSAQSGNECIKAIDGNKDTFWHTQYGVNGDPKPPHTITIDMKTVQNVNGLSVLPRQDGNQNGWIGRHEVYLSSDGVNWGSPVASGSWFADSTTKYSNFETRPARYVRLVAITEANGQPWTSIAEINVFQASSYTAPQPGLGRWGPTIDLPIVPSAAAIEPTSGRVLMWSSYRNDAFRDSPGGITLTSSWDPSTGIVSDRTSTVTGHDMFCPGISMDGNGQIVVSGGNDAKKTSLYDSSSDSWIPGPDMQVARGYNSSATMSDGRVFTIGGSFSGGQVEKNGEVYEPSSKTWTSLPNAKVNPMLTADKRGLYRSDNHAWLFGWKKGSVFQAGPSTAMNWYYTSGSGDVKSAGKRQSDRGVAPDAMCGNAVMYDAVKGKILTFGGSPDYEDSDATTNAHIITLGEPGTSPNTVFASNGLLFARTFHTSVVLPDGSVFITGGQQRAVPLEDSTPVFTPEIYVPEQDTFYKQNPNSIVRAYHSISLLLPDGRVFNGGGGLCGDCETNHFDAQIFTPNYLYDSNGNLATRPKITRTSTQSVVVGGWITIWTDMSISAASLIRYGTATHTVNTDQRRIGLTLTNNGGNSYSFQVPSDSGVALPGYWMLFVMNSAGVPSVASTINVTQGQTGHHHHHH

SEQ ID NO: 163 - DNA, 1953 bp, Artificial Sequence
  Engineered variant of Galactose Oxidase from Fusarium graminearum
atggcatcagcaccgatcggggtagccatcccgcgcaacaactgggccgttacatgcgattccgcccagagtgggaatgaatgcattaaggcaattgacggtaataaagacacgttttggcacactcaatatggtgtgaacggagatcccaaaccgccgcacaccatcacgatcgatatgaaaacagtacaaaacgtgaatggcctttctgtactgccacgtcaggatggcaatcagaatggatggatcggacgtcacgaggtgtatttaagttctgatggggtgaattggggatcgcctgtagcgtctgggtcctggtttgccgattccaccacaaagtactctaattttgagacacgtccggcccgttacgtgcgccttgtcgccattaccgaagccaatgggcaaccgtggacttcaattgccgagattaacgtatttcaggcgtctagttacactgccccgcagccgggcttggggcgctggggcccgacaatcgatcttcccattgtgccatcggccgccgcaatcgagccaacgagcggtcgtgtcttgatgtggagctcttatcgtaacgatgcgtttcgtgactctcctggcggtattacactgacgagctcatgggaccctagcactggaattgtatccgatcgcactagtaccgttaccgggcacgacatgttttgccccggtatctcgatggacgggaacggtcagatcgtggtcagcggtggtaatgatgcaaagaaaacttccttatatgattcgagctcggactcttggattccgggcccggatatgcaggtcgcgcgtgggtataactcaagtgcgactatgagtgatgggcgcgtatttacgattggcggcagttttagtggcggtcaagttctgaagaacggggaggtttactccccgagctcgaagacttggacttcgctgccgaatgcaaaagttaaccccatgctgaccgccgataaacggggtctgtaccgtagcgataatcatgcttggctgtttgggtggaaaaagggtagcgtcttccaagcaggtccaagtactgccatgaactggtattatacatctgggtcgggggacgttaagagtgcagggaagcgtcaatcagaccgcggagtagccccagacgccatgtgcggtaatgccgtaatgtacgacgcagtcaaaggcaaaattttgactttcgggggctcgcccgattatgaggactcagatgcgactacaaatgcccatattatcacgctgggcgagcctggcacgagtccgaatacggtatttgcgagtaatgggttaaatttcgctcgtacctttcatacctcggtggtccttccggacgggagtgtattcatcacaggaggccagcagcgcgcggttccactggaagatagcacacccgtatttactccagagatctacgttcccgaacaagatactttttacaagcaaaacccgaatagtatcgttcgtgcctatcattcgatcagcttgttgctgccggacggacgtgttttcaatggtggcggtggcttatgcggcgattgtgagacgaaccactttgatgcgcaaatctttacgccgaattatctttacgatagcaacgggaacttagccactcgccctaaaatcacccgtacctcaacccagtcagtcgtcgtcggcgggtggatcaccatttggactgacatgtcgatctcggccgcaagtttaattcgctacggaactgctactcacacggtgaacaccgatcagcgacgcatcggcttgacgttaacgaacaacggaggtaattcgtacagctttcaagttccgtcggacagcggggttgctcttccgggatactggatgttgttcgttatgaattccgctggtgtaccctccgttgcgtcgacgattaacgttacccagggccaaactggccaccatcaccatcaccattag

SEQ ID NO: 164 - protein, 650 aa, Artificial Sequence
  Engineered variant of Galactose Oxidase from Fusarium graminearum
MASAPIGVAIPRNNWAVTCDSAQSGNECIKAIDGNKDTFWHTQYGVNGDPKPPHTITIDMKTVQNVNGLSVLPRQDGNQNGWIGRHEVYLSSDGVNWGSPVASGSWFADSTTKYSNFETRPARYVRLVAITEANGQPWTSIAEINVFQASSYTAPQPGLGRWGPTIDLPIVPSAAAIEPTSGRVLMWSSYRNDAFRDSPGGITLTSSWDPSTGIVSDRTSTVTGHDMFCPGISMDGNGQIVVSGGNDAKKTSLYDSSSDSWIPGPDMQVARGYNSSATMSDGRVFTIGGSFSGGQVLKNGEVYSPSSKTWTSLPNAKVNPMLTADKRGLYRSDNHAWLFGWKKGSVFQAGPSTAMNWYYTSGSGDVKSAGKRQSDRGVAPDAMCGNAVMYDAVKGKILTFGGSPDYEDSDATTNAHIITLGEPGTSPNTVFASNGLNFARTFHTSVVLPDGSVFITGGQQRAVPLEDSTPVFTPEIYVPEQDTFYKQNPNSIVRAYHSISLLLPDGRVFNGGGGLCGDCETNHFDAQIFTPNYLYDSNGNLATRPKITRTSTQSVVVGGWITIWTDMSISAASLIRYGTATHTVNTDQRRIGLTLTNNGGNSYSFQVPSDSGVALPGYWMLFVMNSAGVPSVASTINVTQGQTGHHHHHH

SEQ ID NO: 165 - DNA, 1953 bp, Artificial Sequence
  Engineered variant of Galactose Oxidase from Fusarium graminearum
atggcatcagcaccgatcggggtagccatcccgcgcaacaactgggccgttacatgcgattccgcccagagtgggaatgaatgcattaaggcaattgacggtaataaagacacgttttggcacactcaatatggtgtgaacggagatcccaaaccgccgcacaccatcacgatcgatatgaaaacagtacaaaacgtgaatggcctttctgtactgccacgtcaggatggcaatcagaatggatggatcggacgtcacgaggtgtatttaagttctgatggggtgaattggggatcgcctgtagcgtctgggtcctggtttgccgattccaccacaaagtactctaattttgagacacgtccggcccgttacgtgcgccttgtcgccattaccgaagccaatgggcaaccgtggacttcaattgccgagattaacgtatttcaggcgtctagttacactgccccgcagccgggcttggggcgctggggcccgacaatcgatcttcccattgtgccatcggccgccgcaatcgagccaacgagcggtcgtgtcttgatgtggagctcttatcgtcaggatgcgtttcgtgactctcctggcggtattacactgacgagctcatgggaccctagcactggaattgtatccgatcgcactagtaccgttaccgggcacgacatgttttgccccggtatctcgatggacgggaacggtcagatcgtggtcagcggtggtaatgatgcaaagaaaacttccttatatgattcgagctcggactcttggattccgggcccggatatgcaggtcgcgcgtgggtataactcaagtgcgactatgagtgatgggcgcgtatttacgattggcggcagttttagtggcggtcaagttgagaagaacggggaggtttactcgccgagctcgaagacttggacttcgctgccgaatgcaaaagttaaccccatgctgaccgccgataaacggggtctgtaccgtagcgataatcatgcttggctgtttgggtggaaaaagggtagcgtcttccaagcaggtccaagtactgccatgaactggtattatacatctgggtcgggggacgttctgagtgcagggaagcgtcaatcagaccgcggagtagccccagacgccatgtgcggtaatgccgtaatgtacgacgcagtcaaaggcaaaattttgactttcgggggctcgcccgattatgaggactcagatgcgactacaaatgcccatattatcacgctgggcgagcctggcacgagtccgaatacggtatttgcgagtaatgggttactgttcgctcgtacctttcatacctcggtggtccttccggacgggagtgtattcatcacaggaggccagcagcgcgcggttccactggaagatagcacacccgtatttactccagagatctacgttcccgaacaagatactttttacaaacaaaacccgaatagtatcgttcgtgcctatcattcgatcagcttgttgctgccggacggacgtgttttcaatggtggcggtggcttatgcggcgattgtgagacgaaccactttgatgcgcaaatctttacgccgaattatctttacgatagcaacgggaacttagccactcgccctaaaatcacccgtacctcaacccagtcagtcaaggtcggcgggtggatcaccatttggactgacatgtcgatctcggccgcaagtttaattcgctacggaactgctactcacacggtgaacaccgatcagcgacgcatcggcttgacgttaacgaacaacggaggtaattcgtacagctttcaagttccgtcggacagcggggttgctcttccgggatactggatgttgttcgttatgaattccgctggtgtaccctccgttgcgtcgacgattaatgttacccagggccaaactggccaccatcaccatcaccattag

SEQ ID NO: 166 - protein, 650 aa, Artificial Sequence
  Engineered variant of Galactose Oxidase from Fusarium graminearum
MASAPIGVAIPRNNWAVTCDSAQSGNECIKAIDGNKDTFWHTQYGVNGDPKPPHTITIDMKTVQNVNGLSVLPRQDGNQNGWIGRHEVYLSSDGVNWGSPVASGSWFADSTTKYSNFETRPARYVRLVAITEANGQPWTSIAEINVFQASSYTAPQPGLGRWGPTIDLPIVPSAAAIEPTSGRVLMWSSYRQDAFRDSPGGITLTSSWDPSTGIVSDRTSTVTGHDMFCPGISMDGNGQIVVSGGNDAKKTSLYDSSSDSWIPGPDMQVARGYNSSATMSDGRVFTIGGSFSGGQVEKNGEVYSPSSKTWTSLPNAKVNPMLTADKRGLYRSDNHAWLFGWKKGSVFQAGPSTAMNWYYTSGSGDVLSAGKRQSDRGVAPDAMCGNAVMYDAVKGKILTFGGSPDYEDSDATTNAHIITLGEPGTSPNTVFASNGLLFARTFHTSVVLPDGSVFITGGQQRAVPLEDSTPVFTPEIYVPEQDTFYKQNPNSIVRAYHSISLLLPDGRVFNGGGGLCGDCETNHFDAQIFTPNYLYDSNGNLATRPKITRTSTQSVKVGGWITIWTDMSISAASLIRYGTATHTVNTDQRRIGLTLTNNGGNSYSFQVPSDSGVALPGYWMLFVMNSAGVPSVASTINVTQGQTGHHHHHH

SEQ ID NO: 167 - DNA, 1953 bp, Artificial Sequence
  Engineered variant of Galactose Oxidase from Fusarium graminearum
atggcatcagcaccgatcggggtagccatcccgcgcaacaactgggccgttacatgcgattccgcccagagtgggaatgaatgcattaaggcaattgacggtaataaagacacgttttggcacactcaatatggtactaacggagatcccaaaccgccgcacaccatcacgatcgatatgaaaacagtacaaaacgtgaatggcctttctgtactgccacgtcaggatggcaatcagaatggatggatcggacgtcacgaggtgtatttaagttctgatggggtgaattggggatcgcctgtagcgtctgggtcctggtttgccgattccaccacaaagtactctaattttgagacacgtccggcccgttacgtgcgccttgtcgccattaccgaagccaatgggcaaccgtggacttcaattgccgagattaacgtatttcaggcgtctagttacactgccccgcagccgggcttggggcgctggggcccgacaatcgatcttcccattgtgccatcggccgccgcaatcgagccaacgagcggtcgtgtcttgatgtggagctcttatcgtaacgatgcgtttcgtgactctcctggcggtattacactgacgagctcatgggaccctagcactggaattgtatccgatcgcactagtaccgttaccgggcacgacatgttttgccccggtatctcgatggacgggaacggtcagatcgtggtcagcggtggtaatgatgcaaagaaaacttccttatatgattcgagctcggactcttggattccgggcccggatatgcaggtcgcgcgtgggtatcaatcaagtgcgactatgagtgatgggcgcgtatttacgattggcggcagttttagtggcggtcaagttgagaagaacggggaggtttactccccgagctcgaagacttggacttcgctgccgaatgcaaaagttaaccccatgctgaccgccgataaacggggtctgtaccgtagcgataatcatgcttggctgtttgggtggaaaaagggtagcgtcttccaagcaggtccaagtactgccatgaactggtattatacatctgggtcgggggacgttaagagtgcagggaagcgtcaatcagaccgcggagtagccccagacgccatgtgcggtaatgccgtaatgtacgacgcagtcaaaggcaaaattttgactttcgggggctcgcccgattatgaggattcagatgcgactacaaatgcccatattatcacgctgggcgagcctggcacgagtccgaatacggtatttgcgagtaatgggttaaatttcgctcgtacctttcatacctcggtggtccttccggacgggagtgtattcatcacaggaggccagcagcgcgcggttccactggaagatagcacacccgtatttactccagagatctacgttcccgaacaagatactttttacaagcaaaacccgaatagtatcgttcgtgcctatcattcgatcagcttgttgctgccggacggacgtgttttcaatggtggcggtggcttatgcggcgattgtgagacgaaccactttgatgcgcaaatctttacgccgaattatctttacgatagcaacgggaacttagccactcgccctaaaatcacccgtacctcaacccagtcagtcaaggtcggcgggtggatcaccatttggactgacatgtcgatctcggccgcaagtttaattcgctacggaactgctactcacacggtgaacaccgatcagcgacgcatcggcttgacgttaacgaacaacggaggtaattcgtacagctttcaagttccgtcggacagcggggttgctcttccgggatactggatgttgttcgttatgaattccgctggtgtaccctccgttgcgtcgacgattaacgttacccagggccaaactggccaccatcaccatcaccattag

SEQ ID NO: 168 - protein, 650 aa, Artificial Sequence
  Engineered variant of Galactose Oxidase from Fusarium graminearum
MASAPIGVAIPRNNWAVTCDSAQSGNECIKAIDGNKDTFWHTQYGTNGDPKPPHTITIDMKTVQNVNGLSVLPRQDGNQNGWIGRHEVYLSSDGVNWGSPVASGSWFADSTTKYSNFETRPARYVRLVAITEANGQPWTSIAEINVFQASSYTAPQPGLGRWGPTIDLPIVPSAAAIEPTSGRVLMWSSYRNDAFRDSPGGITLTSSWDPSTGIVSDRTSTVTGHDMFCPGISMDGNGQIVVSGGNDAKKTSLYDSSSDSWIPGPDMQVARGYQSSATMSDGRVFTIGGSFSGGQVEKNGEVYSPSSKTWTSLPNAKVNPMLTADKRGLYRSDNHAWLFGWKKGSVFQAGPSTAMNWYYTSGSGDVKSAGKRQSDRGVAPDAMCGNAVMYDAVKGKILTFGGSPDYEDSDATTNAHIITLGEPGTSPNTVFASNGLNFARTFHTSVVLPDGSVFITGGQQRAVPLEDSTPVFTPEIYVPEQDTFYKQNPNSIVRAYHSISLLLPDGRVFNGGGGLCGDCETNHFDAQIFTPNYLYDSNGNLATRPKITRTSTQSVKVGGWITIWTDMSISAASLIRYGTATHTVNTDQRRIGLTLTNNGGNSYSFQVPSDSGVALPGYWMLFVMNSAGVPSVASTINVTQGQTGHHHHHH

SEQ ID NO: 169 - DNA, 1953 bp, Artificial Sequence
  Engineered variant of Galactose Oxidase from Fusarium graminearum
atggcatcagcaccgatcggggtagccatcccgcgcaacaactgggccgttacatgcgattccgcccagagtgggaatgaatgcattaaggcaattgacggtaataaagacacgttttggcacactcaatatggtgtgaacggagatcccaaaccgccgcacaccatcacgatcgatatgaaaacagtacaaaacgtgaatggcctttctgtactgccacgtcaggatggcaatcagaatggatggatcggacgtcacgaggtgtatttaagttctgatggggtgaattggggatcgcctgtagcgtctgggtcctggtttgccgattccaccacaaagtactctaattttgagacacgtccggcccgttacgtgcgccttgtcgccattaccgaagccaatgggcaaccgtggacttcaattgccgagattaacgtatttcaggcgtctagttacactgccccgcagccggggttggggcgctggggcccgacaatcgatcttcccattgtgccatcggccgccgcaatcgagccaacgagcggtcgtgtcttgatgtggagctcttatcgtaacgatgcgtttcgtgactctcctggcggtattacactgacgagctcatgggaccctagcactggaattgtatccgatcgcactagtaccgttaccgggcacgacatgttttgccccggtatctcgatggacgggaacggtcagatcgtggtcagcggtggtaatgatgcaaagaaaacttccttatatgattcgagctcggactcttggattccgggcccggatatgcaggtcgcgcgtgggtataattcaagtgcgactatgagtgatgggcgcgtatttacgattggcggcagttttagtggcggtcaagttgagaagaacggggaggtttactccccgagctcgaagacttggacttcgctgccgaatgcaaaagttaaccccatgctgaccgccgataaacggggtctgtaccgtagcgataatcatgcttggctgtttgggtggaaaaagggtagcgtcttccaagcaggtccaagtactgccatgaactggtattatacatctgggtcgggggacgttctgagtgcagggaagcgtcaatcaaaccgcggagtagccccagacgccatgtgcggtaatgccgtaatgtacgacgcagtcaaaggcaaaattttgactttcgggggctcgcccgattatgaggactcagatgcgactacaaatgcccatattatcacgctgggcgagcctggcacgagtccgaatacggtatttgcgagtaatgggttactgttcgctcgtacctttcatacctcggtggtccttccggacgggagtgtattcatcacaggaggccagcagcgcgcggttccactggaagatagcacacccgtatttactccagagatctacgttcccgaacaagatactttttacaagcaaaacccgaatagtatcgttcgtgcctatcattcgatcagcttgttgctgccggacggacgtgttttcaatggtggcggtggcttatgcggcgattgtgagacgaaccactttgatgcgcaaatctttacgccgaattatctttacgatagcaacgggaacttagccactcgccctaaaatcacccgtacctcaacccagtcagtcaaggtcggcgggtggatcaccatttggactgacatgtcgatctcggccgcaagtttaattcgctacggaactgctactcacacggtgaacaccgatcagcgacgcatcggcttgacgttaacgaacaacggaggtaattcgtacagctttcaagttccgtcggacagcggggttgctcttccgggatactggatgttgttcgttatgaattccgctggtgtaccctccgttgcgtcgacgattaacgttacccagggccaaactggccaccatcaccatcaccattag

SEQ ID NO: 170 - protein, 650 aa, Artificial Sequence
  Engineered variant of Galactose Oxidase from Fusarium graminearum
MASAPIGVAIPRNNWAVTCDSAQSGNECIKAIDGNKDTFWHTQYGVNGDPKPPHTITIDMKTVQNVNGLSVLPRQDGNQNGWIGRHEVYLSSDGVNWGSPVASGSWFADSTTKYSNFETRPARYVRLVAITEANGQPWTSIAEINVFQASSYTAPQPGLGRWGPTIDLPIVPSAAAIEPTSGRVLMWSSYRNDAFRDSPGGITLTSSWDPSTGIVSDRTSTVTGHDMFCPGISMDGNGQIVVSGGNDAKKTSLYDSSSDSWIPGPDMQVARGYNSSATMSDGRVFTIGGSFSGGQVEKNGEVYSPSSKTWTSLPNAKVNPMLTADKRGLYRSDNHAWLFGWKKGSVFQAGPSTAMNWYYTSGSGDVLSAGKRQSNRGVAPDAMCGNAVMYDAVKGKILTFGGSPDYEDSDATTNAHIITLGEPGTSPNTVFASNGLLFARTFHTSVVLPDGSVFITGGQQRAVPLEDSTPVFTPEIYVPEQDTFYKQNPNSIVRAYHSISLLLPDGRVFNGGGGLCGDCETNHFDAQIFTPNYLYDSNGNLATRPKITRTSTQSVKVGGWITIWTDMSISAASLIRYGTATHTVNTDQRRIGLTLTNNGGNSYSFQVPSDSGVALPGYWMLFVMNSAGVPSVASTINVTQGQTGHHHHHH

SEQ ID NO: 171 - DNA, 1953 bp, Artificial Sequence
  Engineered variant of Galactose Oxidase from Fusarium graminearum
atggcatcagcaccgatcggggtagccatcccgcgcaacaactgggccgttacatgcgattccgcccagagtgggaatgaatgcattaaggcaattgacggtaataaagacacgttttggcacactcaatatggtgtaaacggagatcccaaaccgccgcacaccatcacgatcgatatgaaaacagtacaaaacgtgaatggcctttctgtactgccacgtcaggatggcaatcagaatggatggatcggacgtcacgaggtgtatttaagttctgatggggtgaattggggatcgcctgtagcgtctgggtcctggtttgccgattccaccacaaagtactctaattttgagacacgtccggcccgttacgtgcgccttgtcgccattaccgaagccaatgggcaaccgtggacttcaattgccgagattaacgtatttcaggcgtctagttacactgccccgcagccggagttggggcgctggggcccgacaatcgatcttcccattgtgccatcggccgccgcaatcgagccaacgagcggtcgtgtcttgatgtggagctcttatcgtaacgatgcgtttcgtgactctcctggcggtattacactgacgagctcatgggaccctagcactggaattgtatccgatcgcactagtaccgttactgggcacgacatgttttgccccggtatctcgatggacgggaacggtcagatcgtggtcagcggtggtaatgatgcaaagaaaacttccttatatgattcgagctcggactcttggattccgggcccggatatgcaggtcgcgcgtgggtataattcaagtgcgactatgagtgatgggcgcgtatttacgattggcggcagttttagtggcggtcaagttgagaagaacggggaggtttactccccgagctcgaagacttggacttcgctgccgaatgcaaaagttaaccccatgctgaccgccgataaacggggtctgtaccgtagcgataatcatgcttggctgtttgggtggaaaaagggtagcgtcttccaagcaggtccaagtactgccatgaactggtattatacatctgggtcgggggacgttctgagtgcagggaagcgtcaatcaaaccgcggagtagccccagacgccatgtgcggtaatgccgtaatgtacgacgcagtcaaaggcaaaattttgactttcgggggctcgcccgattatgaggactcagatgcgactacaaatgcccatattatcacgctgggcgagcctggcacgagtccgaatacggtatttgcgagtaatgggttactgttcgctcgtacctttcatacctcggtggtccttccggacgggagtgtattcatcacaggaggccagcagcgcgcggttccactggaagatagcacacccgtatttactccagagatctacgttcccgaacaagatactttttacaagcaaaacccgaatagtatcgttcgtgcctatcattcgatcagcttgttgctgccggacggacgtgttttcaatggtggcggtggcttatgcggcgattgtgagacgaaccactttgatgcgcaaatctttacgccgaattatctttacgatagcaacgggaacttagccactcgccctaaaatcacccgtacctcaacccagtcagtcgtcgtcggcgggtggatcaccatttggactgacatgtcgatctcggccgcaagtttaattcgctacggaactgctactcacacggtgaacaccgatcagcgacgcatcggcttgacgttaacgaacaacggaggtaattcgtacagctttcaagttccgtcggacagcggggttgctcttccgggatactggatgttgttcgttatgaattccgctggtgtaccctccgttgcgtcgacgattaacgttacccagggccaaactggccaccatcaccatcaccattag

SEQ ID NO: 172 - protein, 650 aa, Artificial Sequence
  Engineered variant of Galactose Oxidase from Fusarium graminearum
MASAPIGVAIPRNNWAVTCDSAQSGNECIKAIDGNKDTFWHTQYGVNGDPKPPHTITIDMKTVQNVNGLSVLPRQDGNQNGWIGRHEVYLSSDGVNWGSPVASGSWFADSTTKYSNFETRPARYVRLVAITEANGQPWTSIAEINVFQASSYTAPQPELGRWGPTIDLPIVPSAAAIEPTSGRVLMWSSYRNDAFRDSPGGITLTSSWDPSTGIVSDRTSTVTGHDMFCPGISMDGNGQIVVSGGNDAKKTSLYDSSSDSWIPGPDMQVARGYNSSATMSDGRVFTIGGSFSGGQVEKNGEVYSPSSKTWTSLPNAKVNPMLTADKRGLYRSDNHAWLFGWKKGSVFQAGPSTAMNWYYTSGSGDVLSAGKRQSNRGVAPDAMCGNAVMYDAVKGKILTFGGSPDYEDSDATTNAHIITLGEPGTSPNTVFASNGLLFARTFHTSVVLPDGSVFITGGQQRAVPLEDSTPVFTPEIYVPEQDTFYKQNPNSIVRAYHSISLLLPDGRVFNGGGGLCGDCETNHFDAQIFTPNYLYDSNGNLATRPKITRTSTQSVVVGGWITIWTDMSISAASLIRYGTATHTVNTDQRRIGLTLTNNGGNSYSFQVPSDSGVALPGYWMLFVMNSAGVPSVASTINVTQGQTGHHHHHH

SEQ ID NO: 173 - DNA, 1953 bp, Artificial Sequence
  Engineered variant of Galactose Oxidase from Fusarium graminearum
atggcatcagcaccgatcggggtagccatcccgcgcaacaactgggccgttacatgcgattccgcccagagtgggaatgaatgcattaaggcaattgacggtaataaagacacgttttggcacactcaatatggtgtaaacggagatcccaaaccgccgcacaccatcacgatcgatatgaaaacagtacaaaacgtgaatggcctttctgtactgccacgtcaggatggcaatcagaatggatggatcggacgtcacgaggtgtatttaagttctgatggggtgaattggggatcgcctgtagcgtctgggtcctggtttgccgattccaccacaaagtactctaattttgagacacgtccggcccgttacgtgcgccttgtcgccattaccgaagccaatgggcaaccgtggacttcaattgccgagattaacgtatttcaggcgtctagttacactgccccgcagccgggcttggggcgctggggcccgacaatcgatcttcccattgtgccatcggccgccgcaatcgagccaacgagcggtcgtgtcttgatgtggagctcttatcgtcaagatgcgtttcgtgactctcctggcggtattacactgacgagctcatgggaccctagcactggaattgtatccgatcgcactagtaccgttaccgggcacgacatgttttgccccggtatctcgatggacgggaacggtcagatcgtggtcagcggtggtaatgatgcaaagaaaacttccttatatgattcgagctcggactcttggattccgggcccggatatgcaggtcgcgcgtgggtataactcaagtgcgactatgagtgatgggcgcgtatttacgattggcggcagttttagtggcggtcaagttgagaagaacggggaggtttacgagccgagctcgaagacttggacttcgctgccgaatgcaaaagttaaccccatgctgaccgccgataaacggggtctgtaccgtagcgataatcatgcttggctgtttgggtggaaaaagggtagcgtcttccaagcaggtccaagtactgccatgaactggtattatacatctgggtcgggggacgttaagagtgcagggaagcgtcaatcagaccgcggagtagccccagacgccatgtgcggtaatgccgtaatgtacgacgcagtcaaaggcaaaattttgactttcgggggctcgcccgattatgaggactcagatgcgactacaaatgcccatattatcacgctgggcgagcctggcacgctgccgaatacggtatttgcgagtaatgggttactgttcgctcgtacctttcatacctcggtggtccttccggacgggagtgtattcatcacaggaggccagcagcgcgcggttccactggaagatagcacacccgtatttactccagagatctacgttcccgaacaagatactttttacaagcaaaacccgaatagtatcgttcgtgcctatcattcgatcagcttgttgctgccggacggacgtgttttcaatggtggcggtggcttatgcggcgattgtgagacgaaccactttgatgcgcaaatctttacgccgaattatctttacgatagcaacgggaacttagccactcgccctaaaatcacccgtacctcaacccagtcagtcaaggtcggcgggtggatcaccatttggactgacatgtcgatctcggccgcaagtttaattcgctacggaactgctactcacacggtgaacaccgatcagcgacgcatcggcttgacgttaacgaacaacggaggtaattcgtacagctttcaagttccgtcggacagcggggttgctcttccgggatactggatgttgttcgttatgaattccgctggtgtaccctccgttgcgtcgacgattaacgttacccagggccaaactggccaccatcaccatcaccattag

SEQ ID NO: 174 - protein, 650 aa, Artificial Sequence
  Engineered variant of Galactose Oxidase from Fusarium graminearum
MASAPIGVAIPRNNWAVTCDSAQSGNECIKAIDGNKDTFWHTQYGVNGDPKPPHTITIDMKTVQNVNGLSVLPRQDGNQNGWIGRHEVYLSSDGVNWGSPVASGSWFADSTTKYSNFETRPARYVRLVAITEANGQPWTSIAEINVFQASSYTAPQPGLGRWGPTIDLPIVPSAAAIEPTSGRVLMWSSYRQDAFRDSPGGITLTSSWDPSTGIVSDRTSTVTGHDMFCPGISMDGNGQIVVSGGNDAKKTSLYDSSSDSWIPGPDMQVARGYNSSATMSDGRVFTIGGSFSGGQVEKNGEVYEPSSKTWTSLPNAKVNPMLTADKRGLYRSDNHAWLFGWKKGSVFQAGPSTAMNWYYTSGSGDVKSAGKRQSDRGVAPDAMCGNAVMYDAVKGKILTFGGSPDYEDSDATTNAHIITLGEPGTLPNTVFASNGLLFARTFHTSVVLPDGSVFITGGQQRAVPLEDSTPVFTPEIYVPEQDTFYKQNPNSIVRAYHSISLLLPDGRVFNGGGGLCGDCETNHFDAQIFTPNYLYDSNGNLATRPKITRTSTQSVKVGGWITIWTDMSISAASLIRYGTATHTVNTDQRRIGLTLTNNGGNSYSFQVPSDSGVALPGYWMLFVMNSAGVPSVASTINVTQGQTGHHHHHH

SEQ ID NO: 175 - DNA, 1953 bp, Artificial Sequence
  Engineered variant of Galactose Oxidase from Fusarium graminearum
atggcatcagcaccgatcggggtagccatcccgcgcaacaactgggccgttacatgcgattccgcccagagtgggaatgaatgcattaaggcaattgacggtaataaagacacgttttggcacactcaatatggtgctaacggagatcccaaaccgccgcacaccatcacgatcgatatgaaaacagtacaaaacgtgaatggcctttctgtactgccacgtcaggatggcaatcagaatggatggatcggacgtcacgaggtgtatttaagttctgatggggtgaattggggatcgcctgtagcgtctgggtcctggtttgccgattccaccacaaagtactctaattttgagacacgtccggcccgttacgtgcgccttgtcgccattaccgaagccaatgggcaaccgtggacttcaattgccgagattaacgtatttcaggcgtctagttacactgccccgcagccggagttggggcgctggggcccgacaatcgatcttcccattgtgccatcggccgccgcaatcgagccaacgagcggtcgtgtcttgatgtggagctcttatcgtaacgatgcgtttcgtgactctcctggcggtattacactgacgagctcatgggaccctagcactggaattgtatccgaacgcactagtaccgttaccgggcacgacatgttttgccccggtatctcgatggacgggaacggtcagatcgtggtcagcggtggtaatgatgcaaagaaaacttccttatatgattcgagctcggactcttggattccgggcccggatatgcaggtcgcgcgtgggtataattcaagtgcgactatgagtgatgggcgcgtatttacgattggcggcagttttagtggcggtcaagttctgaagaacggggaggtttactcgccgagctcgaagacttggacttcgctgccgaatgcaaaagttaaccccatgctgaccgccgataaacggggtctgtaccgtagcgataatcatgcttggctgtttgggtggaaaaagggtagcgtcttccaagcaggtccaagtactgccatgaactggtattatacatctgggtcgggggacgttaagagtgcagggaagcgtcaatcagaccgcggagtagccccagacgccatgtgcggtaatgccgtaatgtacgacgcagtcaaaggcaaaattttgactttcgggggctcgcccgattatgaggattcagatgcgactacaaatgcccatattatcacgctgggcgagcctggcacgagtccgaatacggtatttgcgagtaatgggttactgttcgctcgtacctttcatacctcggtggtccttccggacgggagtgtattcatcacaggaggccagcagcgcgcggttccactggaagatagcacacccgtatttactccagagatctacgttcccgaacaagatactttttacaaacaaaacccgaatagtatcgttcgtgcctatcattcgatcagcttgttgctgccggacggacgtgttttcaatggtggcggtggcttatgcggcgattgtgagacgaaccactttgatgcgcaaatctttacgccgaattatctttacgatagcaacgggaacttagccactcgccctaaaatcacccgtacctcaacccagtcagtcaaggtcggcgggtggatcaccatttggactgacatgtcgatctcggccgcaagtttaattcgctacggaactgctactcacacggtgaacaccgatcagcgacgcatcggcttgacgttaacgaacaacggaggtaattcgtacagctttcaagttccgtcggacagcggggttgctcttccgggatactggatgttgttcgttatgaattccgctggtgtaccctccgttgcgtcgacgattaacgttacccagggccaaactggccaccatcaccatcaccattag

SEQ ID NO: 176 - protein, 650 aa, Artificial Sequence
  Engineered variant of Galactose Oxidase from Fusarium graminearum
MASAPIGVAIPRNNWAVTCDSAQSGNECIKAIDGNKDTFWHTQYGANGDPKPPHTITIDMKTVQNVNGLSVLPRQDGNQNGWIGRHEVYLSSDGVNWGSPVASGSWFADSTTKYSNFETRPARYVRLVAITEANGQPWTSIAEINVFQASSYTAPQPELGRWGPTIDLPIVPSAAAIEPTSGRVLMWSSYRNDAFRDSPGGITLTSSWDPSTGIVSERTSTVTGHDMFCPGISMDGNGQIVVSGGNDAKKTSLYDSSSDSWIPGPDMQVARGYNSSATMSDGRVFTIGGSFSGGQVLKNGEVYSPSSKTWTSLPNAKVNPMLTADKRGLYRSDNHAWLFGWKKGSVFQAGPSTAMNWYYTSGSGDVKSAGKRQSDRGVAPDAMCGNAVMYDAVKGKILTFGGSPDYEDSDATTNAHIITLGEPGTSPNTVFASNGLLFARTFHTSVVLPDGSVFITGGQQRAVPLEDSTPVFTPEIYVPEQDTFYKQNPNSIVRAYHSISLLLPDGRVFNGGGGLCGDCETNHFDAQIFTPNYLYDSNGNLATRPKITRTSTQSVKVGGWITIWTDMSISAASLIRYGTATHTVNTDQRRIGLTLTNNGGNSYSFQVPSDSGVALPGYWMLFVMNSAGVPSVASTINVTQGQTGHHHHHH

SEQ ID NO: 177 - DNA, 1953 bp, Artificial Sequence
  Engineered variant of Galactose Oxidase from Fusarium graminearum
atggcatcagcaccgatcggggtagccatcccgcgcaacaactgggccgttacatgcgattccgcccagagtgggaatgaatgcattaaggcaattgacggtaataaagacacgttttggcacactcaatatggtgtaaacggagatcccaaaccgccgcacaccatcacgatcgatatgaaaacagtacaaaacgtgaatggcctttctgtactgccacgtcaggatggcaatcagaatggatggatcggacgtcacgaggtgtatttaagttctgatggggtgaattggggatcgcctgtagcgtctgggtcctggtttgccgattccaccacaaagtactctaattttgagacacgtccggcccgttacgtgcgccttgtcgccattaccgaagccaatgggcaaccgtggacttcaattgccgagattaacgtatttcaggcgtctagttacactgccccgcagccgggcttggggcgctggggcccgacaatcgatcttcccattgtgccatcggccgccgcaatcgagccaacgagcggtcgtgtcttgatgtggagctcttatcgtaacgatgcgtttcgtgactctcctggcggtattacactgacgagctcatgggaccctagcactggaattgtatccgatcgcactagtaccgttaccgggcacgacatgttttgccccggtatctcgatggacgggaacggtcagatcgtggtcagcggtggtaatgatgcaaagaaaacttccttatatgattcgagctcggactcttggattccgggcccggatatgcaggtcgcgcgtgggtataactcaagtgcgactatgagtgatgggcgcgtatttacgattggcggcagttttagtggcggtgtagttgagaagaacggggaggtttactccccgagctcgaagacttggacttcgctgccgaatgcaaaagttaaccccatgctgaccgccgataaacggggtctgtaccgtagcgataatcatgcttggctgtttgggtggaaaaagggtagcgtcttccaagcaggtccaagtactgccatgaactggtattatacatctgggtcgggggacgttctgagtgcagggaagcgtcaatcaaaccgcggagtagccccagacgccatgtgcggtaatgccgtaatgtacgacgcagtcaaaggcaaaattttgactttcgggggctcgcccgattatgaggactcagatgcgactacaaatgcccatattatcacgctgggcgagcctggcacgagtccgaatacggtatttgcgagtaatgggttactgttcgctcgtacctttcatacctcggtggtccttccggacgggagtgtattcatcacaggaggccagcagcgcgcggttccactggaagatagcacacccgtatttactccagagatctacgttcccgaacaagatactttttacaagcaaaacccgaatagtatcgttcgtgcctatcattcgatcagcttgttgctgccggacggacgtgttttcaatggtggcggtggcttatgcggcgattgtgagacgaaccactttgatgcgcaaatctttacgccgaattatctttacgatagcaacgggaacttagccactcgccctaaaatcacccgtacctcaacccagtcagtcgtggtcggcgggtggatcaccatttggactgacatgtcgatctcggccgcaagtttaattcgctacggaactgctactcacacggtgaacaccgatcagcgacgcatcggcttgacgttaacgaacaacggaggtaattcgtacagctttcaagttccgtcggacagcggggttgctcttccgggatactggatgttgttcgttatgaattccgctggtgtaccctccgttgcgtcgacgattaatgttacccagggccaaactggccaccatcaccatcaccattag

SEQ ID NO: 178 - protein, 650 aa, Artificial Sequence
  Engineered variant of Galactose Oxidase from Fusarium graminearum
MASAPIGVAIPRNNWAVTCDSAQSGNECIKAIDGNKDTFWHTQYGVNGDPKPPHTITIDMKTVQNVNGLSVLPRQDGNQNGWIGRHEVYLSSDGVNWGSPVASGSWFADSTTKYSNFETRPARYVRLVAITEANGQPWTSIAEINVFQASSYTAPQPGLGRWGPTIDLPIVPSAAAIEPTSGRVLMWSSYRNDAFRDSPGGITLTSSWDPSTGIVSDRTSTVTGHDMFCPGISMDGNGQIVVSGGNDAKKTSLYDSSSDSWIPGPDMQVARGYNSSATMSDGRVFTIGGSFSGGVVEKNGEVYSPSSKTWTSLPNAKVNPMLTADKRGLYRSDNHAWLFGWKKGSVFQAGPSTAMNWYYTSGSGDVLSAGKRQSNRGVAPDAMCGNAVMYDAVKGKILTFGGSPDYEDSDATTNAHIITLGEPGTSPNTVFASNGLLFARTFHTSVVLPDGSVFITGGQQRAVPLEDSTPVFTPEIYVPEQDTFYKQNPNSIVRAYHSISLLLPDGRVFNGGGGLCGDCETNHFDAQIFTPNYLYDSNGNLATRPKITRTSTQSVVVGGWITIWTDMSISAASLIRYGTATHTVNTDQRRIGLTLTNNGGNSYSFQVPSDSGVALPGYWMLFVMNSAGVPSVASTINVTQGQTGHHHHHH

SEQ ID NO: 179 - DNA, 1953 bp, Artificial Sequence
  Engineered variant of Galactose Oxidase from Fusarium graminearum
atggcatcagcaccgatcggggtagccatcccgcgcaacaactgggccgttacatgcgattccgcccagagtgggaatgaatgcattaaggcaattgacggtaataaagacacgttttggcacactcaatatggtgtaaacggagatcccaaaccgccgcacaccatcacgatcgatatgaaaacagtacaaaacgtgaatggcctttctgtactgccacgtcaggatggcaatcagaatggatggatcggacgtcacgaggtgtatttaagttctgatggggtgaattggggatcgcctgtagcgtctgggtcctggtttgccgattccaccacaaagtactctaattttgagacacgtccggcccgttacgtgcgccttgtcgccattaccgaagccaatgggcaaccgtggacttcaattgccgagattaacgtatttcaggcgtctagttacactgccccgcagccgggcttggggcgctggggcccgacaatcgatcttcccattgtgccatcggccgccgcaatcgagccaacgagcggtcgtgtcttgatgtggagctcttatcgtcaggatgcgtttcgtgactctcctggcggtattacactgacgagctcatgggaccctagcactggaattgtatccgatcgcactagtaccgttaccgggcacgacatgttttgccccggtatctcgatggacgggaacggtcagatcgtggtcagcggtggtaatgatgcaaagaaaacttccttatatgattcgagctcggactcttggattccgggcccggatatgcaggtcgcgcgtgggtataactcaagtgcgactatgagtgatgggcgcgtatttacgattggcggcagttttagtggcggtcaagttgagaagaacggggaggtttactccccgagctcgaagacttggacttcgctgccgaatgcaaaagttaaccccatgctgaccgccgataaacggggtctgtaccgtagcgataatcatgcttggctgtttgggtggaaaaagggtagcgtcttccaagcaggtccaagtactgccatgaactggtattatacatctgggtcgggggacgttctgagtgcagggaagcgtcaatcagaccgcggagtagccccagacgccatgtgcggtaatgccgtaatgtacgacgcagtcaaaggcaaaattttgactttcgggggctcgcccgattatgaggactcagatgcgactacaaatgcccatattatcacgctgggcgagcctggcacgagtccgaatacggtatttgcgagtaatgggttactgttcgctcgtacctttcatacctcggtggtccttccggacgggagtgtattcatcacaggaggccagcagcgcgcggttccactggaagatagcacacccgtatttactccagagatctacgttcccgaacaagatactttttacaagcaaaacccgaatagtatcgttcgtgcctatcattcgatcagcttgttgctgccggacggacgtgttttcaatggtggcggtggcttatgcggcgattgtgagacgaaccactttgatgcgcaaatctttacgccgaattatctttacgatagcaacgggaacttagccactcgccctaaaatcacccgtacctcaacccagtcagtcgtggtcggcgggtggatcaccatttggactgacatgtcgatctcggccgcaagtttaattcgctacggaactgctactcacacggtgaacaccgatcagcgacgcatcggcttgacgttaacgaacaacggaggtaattcgtacagctttcaagttccgtcggacagcggggttgctcttccgggatactggatgttgttcgttatgaattccgctggtgtaccctccgttgcgtcgacgattaacgttacccagggccaaactggccaccatcaccatcaccattag

SEQ ID NO: 180 - protein, 650 aa, Artificial Sequence
  Engineered variant of Galactose Oxidase from Fusarium graminearum
MASAPIGVAIPRNNWAVTCDSAQSGNECIKAIDGNKDTFWHTQYGVNGDPKPPHTITIDMKTVQNVNGLSVLPRQDGNQNGWIGRHEVYLSSDGVNWGSPVASGSWFADSTTKYSNFETRPARYVRLVAITEANGQPWTSIAEINVFQASSYTAPQPGLGRWGPTIDLPIVPSAAAIEPTSGRVLMWSSYRQDAFRDSPGGITLTSSWDPSTGIVSDRTSTVTGHDMFCPGISMDGNGQIVVSGGNDAKKTSLYDSSSDSWIPGPDMQVARGYNSSATMSDGRVFTIGGSFSGGQVEKNGEVYSPSSKTWTSLPNAKVNPMLTADKRGLYRSDNHAWLFGWKKGSVFQAGPSTAMNWYYTSGSGDVLSAGKRQSDRGVAPDAMCGNAVMYDAVKGKILTFGGSPDYEDSDATTNAHIITLGEPGTSPNTVFASNGLLFARTFHTSVVLPDGSVFITGGQQRAVPLEDSTPVFTPEIYVPEQDTFYKQNPNSIVRAYHSISLLLPDGRVFNGGGGLCGDCETNHFDAQIFTPNYLYDSNGNLATRPKITRTSTQSVVVGGWITIWTDMSISAASLIRYGTATHTVNTDQRRIGLTLTNNGGNSYSFQVPSDSGVALPGYWMLFVMNSAGVPSVASTINVTQGQTGHHHHHH

SEQ ID NO: 181 - DNA, 1953 bp, Artificial Sequence
  Engineered variant of Galactose Oxidase from Fusarium graminearum
atggcatcagcaccgatcggggtagccatcccgcgcaacaactgggccgttacatgcgattccgcccagagtgggaatgaatgcattaaggcaattgacggtaataaagacacgttttggcacactcaatatggtgctaacggagatcccaaaccgccgcacaccatcacgatcgatatgaaaacagtacaaaacgtgaatggcctttctgtactgccacgtcaggatggcaatcagaatggatggatcggacgtcacgaggtgtatttaagttctgatggggtgaattggggatcgcctgtagcgtctgggtcctggtttgccgattccaccacaaagtactctaattttgagacacgtccggcccgttacgtgcgccttgtcgccattaccgaagccaatgggcaaccgtggacttcaattgccgagattaacgtatttcaggcgtctagttacactgccccgcagccgggcttggggcgctggggcccgacaatcgatcttcccattgtgccatcggccgccgcaatcgagccaacgagcggtcgtgtcttgatgtggagctcttatcgtcaagatgcgtttcgtgactctcctggcggtattacactgacgagctcatgggaccctagcactggaattgtatccgatcgcactagtaccgttaccgggcacgacatgttttgccccggtatctcgatggacgggaacggtcagatcgtggtcagcggtggtaatgatgcaaagaaaacttccttatatgattcgagctcggactcttggattccgggcccggatatgcaggtcgcgcgtgggtatcaatcaagtgcgactatgagtgatgggcgcgtatttacgattggcggcagttttagtggcggtcaagttgagaagaacggggaggtttactccccgagctcgaagacttggacttcgctgccgaatgcaaaagttaaccccatgctgaccgccgataaacggggtctgtaccgtagcgataatcatgcttggctgtttgggtggaaaaagggtagcgtcttccaagcaggtccaagtactgccatgaactggtattatacatctgggtcgggggacgttctgagtgcagggaagcgtcaatcaaaccgcggagtagccccagacgccatgtgcggtaatgccgtaatgtacgacgcagtcaaaggcaaaattttgactttcgggggctcgcccgattatgaggattcagatgcgactacaaatgcccatattatcacgctgggcgagcctggcacgagtccgaatacggtatttgcgagtaatgggttaaatttcgctcgtacctttcatacctcggtggtccttccggacgggagtgtattcatcacaggaggccagcagcgcgcggttccactggaagatagcacacccgtatttactccagagatctacgttcccgaacaagatactttttacaagcaaaacccgaatagtatcgttcgtgcctatcattcgatcagcttgttgctgccggacggacgtgttttcaatggtggcggtggcttatgcggcgattgtgagacgaaccactttgatgcgcaaatctttacgccgaattatctttacgatagcaacgggaacttagccactcgccctaaaatcacccgtacctcaacccagtcagtcgtcgtcggcgggtggatcaccatttggactgacatgtcgatctcggccgcaagtttaattcgctacggaactgctactcacacggtgaacaccgatcagcgacgcatcggcttgacgttaacgaacaacggaggtaattcgtacagctttcaagttccgtcggacagcggggttgctcttccgggatactggatgttgttcgttatgaattccgctggtgtaccctccgttgcgtcgacgattcgtgttacccagggccaaactggccaccatcaccatcaccattag

SEQ ID NO: 182 - protein, 650 aa, Artificial Sequence
  Engineered variant of Galactose Oxidase from Fusarium graminearum
MASAPIGVAIPRNNWAVTCDSAQSGNECIKAIDGNKDTFWHTQYGANGDPKPPHTITIDMKTVQNVNGLSVLPRQDGNQNGWIGRHEVYLSSDGVNWGSPVASGSWFADSTTKYSNFETRPARYVRLVAITEANGQPWTSIAEINVFQASSYTAPQPGLGRWGPTIDLPIVPSAAAIEPTSGRVLMWSSYRQDAFRDSPGGITLTSSWDPSTGIVSDRTSTVTGHDMFCPGISMDGNGQIVVSGGNDAKKTSLYDSSSDSWIPGPDMQVARGYQSSATMSDGRVFTIGGSFSGGQVEKNGEVYSPSSKTWTSLPNAKVNPMLTADKRGLYRSDNHAWLFGWKKGSVFQAGPSTAMNWYYTSGSGDVLSAGKRQSNRGVAPDAMCGNAVMYDAVKGKILTFGGSPDYEDSDATTNAHIITLGEPGTSPNTVFASNGLNFARTFHTSVVLPDGSVFITGGQQRAVPLEDSTPVFTPEIYVPEQDTFYKQNPNSIVRAYHSISLLLPDGRVFNGGGGLCGDCETNHFDAQIFTPNYLYDSNGNLATRPKITRTSTQSVVVGGWITIWTDMSISAASLIRYGTATHTVNTDQRRIGLTLTNNGGNSYSFQVPSDSGVALPGYWMLFVMNSAGVPSVASTIRVTQGQTGHHHHHH

SEQ ID NO: 183 - DNA, 1953 bp, Artificial Sequence
  Engineered variant of Galactose Oxidase from Fusarium graminearum
atggcatcagcaccgatcggggtagccatcccgcgcaacaactgggccgttacatgcgattccgcccagagtgggaatgaatgcattaaggcaattgacggtaataaagacacgttttggcacactcaatatggtgtaaacggagatcccaaaccgccgcacaccatcacgatcgatatgaaaacagtacaaaacgtgaatggcctttctgtactgccacgtcaggatggcaatcagaatggatggatcggacgtcacgaggtgtatttaagttctgatggggtgaattggggatcgcctgtagcgtctgggtcctggtttgccgattccaccacaaagtactctaattttgagacacgtccggcccgttacgtgcgccttgtcgccattaccgaagccaatgggcaaccgtggacttcaattgccgagattaacgtatttcaggcgtctagttacactgccccgcagccggagttggggcgctggggcccgacaatcgatcttcccattgtgccatcggccgccgcaatcgagccaacgagcggtcgtgtcttgatgtggagctcttatcgtaacgatgcgtttcgtgactctcctggcggtattacactgacgagctcatgggaccctagcactggaattgtatccgatcgcactagtaccgttaccgggcacgacatgttttgccccggtatctcgatggacgggaacggtcagatcgtggtcagcggtggtaatgatgcaaagaaaacttccttatatgattcgagctcggactcttggattccgggcccggatatgcaggtcgcgcgtgggtatcaatcaagtgcgactatgagtgatgggcgcgtatttacgattggcggcagttttagtggcggtcaagttgagaagaacggggaggtttactccccgagctcgaagacttggacttcgctgccgaatgcaaaagttaaccccatgctgaccgccgataaacggggtctgtaccgtagcgataatcatgcttggctgtttgggtggaaaaagggtagcgtcttccaagcaggtccaagtactgccatgaactggtattatacatctgggtcgggggacgttaagagtgcagggaagcgtcaatcagaccgcggagtagccccagacgccatgtgcggtaatgccgtaatgtacgacgcagtcaaaggcaaaattttgactttcgggggctcgcccgattatgaggactcagatgcgactacaaatgcccatattatcacgctgggcgagcctggcacgagtccgaatacggtatttgcgagtaatgggttactgttcgctcgtacctttcatacctcggtggtccttccggacgggagtgtattcatcacaggaggccagcagcgcgcggttccactggaagatagcacacccgtatttactccagagatctacgttcccgaacaagatactttttacaagcaaaacccgaatagtatcgttcgtgcctatcattcgatcagcttgttgctgccggacggacgtgttttcaatggtggcggtggcttatgcggcgattgtgagacgaaccactttgatgcgcaaatctttacgccgaattatctttacgatagcaacgggaacttagccactcgccctaaaatcacccgtacctcaacccagtcagtcaaggtcggcgggtggatcaccatttggactgacatgtcgatctcggccgcaagtttaattcgctacggaactgctactcacacggtgaacaccgatcagcgacgcatcggcttgacgttaacgaacaacggaggtaattcgtacagctttcaagttccgtcggacagcggggttgctcttccgggatactggatgttgttcgttatgaattccgctggtgtaccctccgttgcgtcgacgattaacgttacccagggccaaactggccaccatcaccatcaccattag

SEQ ID NO: 184 - protein, 650 aa, Artificial Sequence
  Engineered variant of Galactose Oxidase from Fusarium graminearum
MASAPIGVAIPRNNWAVTCDSAQSGNECIKAIDGNKDTFWHTQYGVNGDPKPPHTITIDMKTVQNVNGLSVLPRQDGNQNGWIGRHEVYLSSDGVNWGSPVASGSWFADSTTKYSNFETRPARYVRLVAITEANGQPWTSIAEINVFQASSYTAPQPELGRWGPTIDLPIVPSAAAIEPTSGRVLMWSSYRNDAFRDSPGGITLTSSWDPSTGIVSDRTSTVTGHDMFCPGISMDGNGQIVVSGGNDAKKTSLYDSSSDSWIPGPDMQVARGYQSSATMSDGRVFTIGGSFSGGQVEKNGEVYSPSSKTWTSLPNAKVNPMLTADKRGLYRSDNHAWLFGWKKGSVFQAGPSTAMNWYYTSGSGDVKSAGKRQSDRGVAPDAMCGNAVMYDAVKGKILTFGGSPDYEDSDATTNAHIITLGEPGTSPNTVFASNGLLFARTFHTSVVLPDGSVFITGGQQRAVPLEDSTPVFTPEIYVPEQDTFYKQNPNSIVRAYHSISLLLPDGRVFNGGGGLCGDCETNHFDAQIFTPNYLYDSNGNLATRPKITRTSTQSVKVGGWITIWTDMSISAASLIRYGTATHTVNTDQRRIGLTLTNNGGNSYSFQVPSDSGVALPGYWMLFVMNSAGVPSVASTINVTQGQTGHHHHHH

SEQ ID NO: 185 - DNA, 1953 bp, Artificial Sequence
  Engineered variant of Galactose Oxidase from Fusarium graminearum
atggcatcagcaccgatcggggtagccatcccgcgcaacaactgggccgttacatgcgattccgcccagagtgggaatgaatgcattaaggcaattgacggtaataaagacacgttttggcacactcaatatggtgtaaacggagatcccaaaccgccgcacaccatcacgatcgatatgaaaacagtacaaaacgtgaatggcctttctgtactgccacgtcaggatggcaatcagaatggatggatcggacgtcacgaggtgtatttaagttctgatggggtgaattggggatcgcctgtagcgtctgggtcctggtttgccgattccaccacaaagtactctaattttgagacacgtccggcccgttacgtgcgccttgtcgccattaccgaagccaatgggcaaccgtggacttcaattgccgagattaacgtatttcaggcgtctagttacactgccccgcagccggggttggggcgctggggcccgacaatcgatcttcccattgtgccatcggccgccgcaatcgagccaacgagcggtcgtgtcttgatgtggagctcttatcgtaacgatgcgtttcgtgactctcctggcggtattacactgacgagctcatgggaccctagcactggaattgtatccgatcgcactagtaccgttaccgggcacgacatgttttgccccggtatctcgatggacgggaacggtcagatcgtggtcagcggtggtaatgatgcaaagaaaacttccttatatgattcgagctcggactcttggattccgggcccggatatgcaggtcgcgcgtgggtataattcaagtgcgactatgagtgatgggcgcgtatttacgattggcggcagttttagtggcggtcaagttgagaagaacggggaggtttacgagccgagctcgaagacttggacttcgctgccgaatgcaaaagttaaccccatgctgaccgccgataaacggggtctgtaccgtagcgataatcatgcttggctgtttgggtggaaaaagggtagcgtcttccaagcaggtccaagtactgccatgaactggtattatacatctgggtcgggggacgttaagagtgcagggaagcgtcaatcagaccgcggagtagccccagacgccatgtgcggtaatgccgtaatgtacgacgcagtcaaaggcaaaattttgactttcgggggctcgcccgattatgaggactcagatgcgactacaaatgcccatattatcacgctgggcgagcctggcacgagtccgaatacggtatttgcgagtaatgggttactgttcgctcgtacctttcatacctcggtggtccttccggacgggagtgtattcatcacaggaggccagcagcgcgcggttccactggaagatagcacacccgtatttactccagagatctacgttcccgaacaagatactttttacaagcaaaacccgaatagtatcgttcgtgcctatcattcgatcagcttgttgctgccggacggacgtgttttcaatggtggcggtggcttatgcggcgattgtgagacgaaccactttgatgcgcaaatctttacgccgaattatctttacgatagcaacgggaacttagccactcgccctaaaatcacccgtacctcaacccagtcagtcgtcgtcggcgggtggatcaccatttggactgacatgtcgatctcggccgcaagtttaattcgctacggaactgctactcacacggtgaacaccgatcagcgacgcatcggcttgacgttaacgaacaacggaggtaattcgtacagctttcaagttccgtcggacagcggggttgctcttccgggatactggatgttgttcgttatgaattccgctggtgtaccctccgttgcgtcgacgattcgtgttacccagggccaaactggccaccatcaccatcaccattag

SEQ ID NO: 186 - protein, 650 aa, Artificial Sequence
  Engineered variant of Galactose Oxidase from Fusarium graminearum
MASAPIGVAIPRNNWAVTCDSAQSGNECIKAIDGNKDTFWHTQYGVNGDPKPPHTITIDMKTVQNVNGLSVLPRQDGNQNGWIGRHEVYLSSDGVNWGSPVASGSWFADSTTKYSNFETRPARYVRLVAITEANGQPWTSIAEINVFQASSYTAPQPGLGRWGPTIDLPIVPSAAAIEPTSGRVLMWSSYRNDAFRDSPGGITLTSSWDPSTGIVSDRTSTVTGHDMFCPGISMDGNGQIVVSGGNDAKKTSLYDSSSDSWIPGPDMQVARGYNSSATMSDGRVFTIGGSFSGGQVEKNGEVYEPSSKTWTSLPNAKVNPMLTADKRGLYRSDNHAWLFGWKKGSVFQAGPSTAMNWYYTSGSGDVKSAGKRQSDRGVAPDAMCGNAVMYDAVKGKILTFGGSPDYEDSDATTNAHIITLGEPGTSPNTVFASNGLLFARTFHTSVVLPDGSVFITGGQQRAVPLEDSTPVFTPEIYVPEQDTFYKQNPNSIVRAYHSISLLLPDGRVFNGGGGLCGDCETNHFDAQIFTPNYLYDSNGNLATRPKITRTSTQSVVVGGWITIWTDMSISAASLIRYGTATHTVNTDQRRIGLTLTNNGGNSYSFQVPSDSGVALPGYWMLFVMNSAGVPSVASTIRVTQGQTGHHHHHH

SEQ ID NO: 187 - DNA, 1953 bp, Artificial Sequence
  Engineered variant of Galactose Oxidase from Fusarium graminearum
atggcatcagcaccgatcggggtagccatcccgcgcaacaactgggccgttacatgcgattccgcccagagtgggaatgaatgcattaaggcaattgacggtaataaagacacgttttggcacactcaatatggtactaacggagatcccaaaccgccgcacaccatcacgatcgatatgaaaacagtacaaaacgtgaatggcctttctgtactgccacgtcaggatggcaatcagaatggatggatcggacgtcacgaggtgtatttaagttctgatggggtgaattggggatcgcctgtagcgtctgggtcctggtttgccgattccaccacaaagtactctaattttgagacacgtccggcccgttacgtgcgccttgtcgccattaccgaagccaatgggcaaccgtggacttcaattgccgagattaacgtatttcaggcgtctagttacactgccccgcagccgggcttggggcgctggggcccgacaatcgatcttcccattgtgccatcggccgccgcaatcgagccaacgagcggtcgtgtcttgatgtggagctcttatcgtaacgatgcgtttcgtgactctcctggcggtattacactgacgagctcatgggaccctagcactggaattgtatccgatcgcactagtaccgttaccgggcacgacatgttttgccccggtatctcgatggacgggaacggtcagatcgtggtcagcggtggtaatgatgcaaagaaaacttccttatatgattcgagctcggactcttggattccgggcccggatatgcaggtcgcgcgtgggtatcaatcaagtgcgactatgagtgatgggcgcgtatttacgattggcggcagttttagtggcggtcaagttgagaagaacggggaggtttacgagccgagctcgaagacttggacttcgctgccgaatgcaaaagttaaccccatgctgaccgccgataaacggggtctgtaccgtagcgataatcatgcttggctgtttgggtggaaaaagggtagcgtcttccaagcaggtccaagtactgccatgaactggtattatacatctgggtcgggggacgttctgagtgcagggaagcgtcaatcagaccgcggagtagccccagacgccatgtgcggtaatgccgtaatgtacgacgcagtcaaaggcaaaattttgactttcgggggctcgcccgattatgaggactcagatgcgactacaaatgcccatattatcacgctgggcgagcctggcacgagtccgaatacggtatttgcgagtaatgggttactgttcgctcgtacctttcatacctcggtggtccttccggacgggagtgtattcatcacaggaggccagcagcgcgcggttccactggaagatagcacacccgtatttactccagagatctacgttcccgaacaagatactttttacaagcaaaacccgaatagtatcgttcgtgcctatcattcgatcagcttgttgctgccggacggacgtgttttcaatggtggcggtggcttatgcggcgattgtgagacgaaccactttgatgcgcaaatctttacgccgaattatctttacgatagcaacgggaacttagccactcgccctaaaatcacccgtacctcaacccagtcagtcgtcgtcggcgggtggatcaccatttggactgacatgtcgatctcggccgcaagtttaattcgctacggaactgctactcacacggtgaacaccgatcagcgacgcatcggcttgacgttaacgaacaacggaggtaattcgtacagctttcaagttccgtcggacagcggggttgctcttccgggatactggatgttgttcgttatgaattccgctggtgtaccctccgttgcgtcgacgattcgtgttacccagggccaaactggccaccatcaccatcaccattag

SEQ ID NO: 188 - protein, 650 aa, Artificial Sequence
  Engineered variant of Galactose Oxidase from Fusarium graminearum
MASAPIGVAIPRNNWAVTCDSAQSGNECIKAIDGNKDTFWHTQYGTNGDPKPPHTITIDMKTVQNVNGLSVLPRQDGNQNGWIGRHEVYLSSDGVNWGSPVASGSWFADSTTKYSNFETRPARYVRLVAITEANGQPWTSIAEINVFQASSYTAPQPGLGRWGPTIDLPIVPSAAAIEPTSGRVLMWSSYRNDAFRDSPGGITLTSSWDPSTGIVSDRTSTVTGHDMFCPGISMDGNGQIVVSGGNDAKKTSLYDSSSDSWIPGPDMQVARGYQSSATMSDGRVFTIGGSFSGGQVEKNGEVYEPSSKTWTSLPNAKVNPMLTADKRGLYRSDNHAWLFGWKKGSVFQAGPSTAMNWYYTSGSGDVLSAGKRQSDRGVAPDAMCGNAVMYDAVKGKILTFGGSPDYEDSDATTNAHIITLGEPGTSPNTVFASNGLLFARTFHTSVVLPDGSVFITGGQQRAVPLEDSTPVFTPEIYVPEQDTFYKQNPNSIVRAYHSISLLLPDGRVFNGGGGLCGDCETNHFDAQIFTPNYLYDSNGNLATRPKITRTSTQSVVVGGWITIWTDMSISAASLIRYGTATHTVNTDQRRIGLTLTNNGGNSYSFQVPSDSGVALPGYWMLFVMNSAGVPSVASTIRVTQGQTGHHHHHH

SEQ ID NO: 189 - DNA, 1953 bp, Artificial Sequence
  Engineered variant of Galactose Oxidase from Fusarium graminearum
atggcatcagcaccgatcggggtagccatcccgcgcaacaactgggccgttacatgcgattccgcccagagtgggaatgaatgcattaaggcaattgacggtaataaagacacgttttggcacactcaatatggtgtgaacggagatcccaaaccgccgcacaccatcacgatcgatatgaaaacagtacaaaacgtgaatggcctttctgtactgccacgtcaggatggcaatcagaatggatggatcggacgtcacgaggtgtatttaagttctgatggggtgaattggggatcgcctgtagcgtctgggtcctggtttgccgattccaccacaaagtactctaattttgagacacgtccggcccgttacgtgcgccttgtcgccattaccgaagccaatgggcaaccgtggacttcaattgccgagattaacgtatttcaggcgtctagttacactgccccgcagccgggcttggggcgctggggcccgacaatcgatcttcccattgtgccatcggccgccgcaatcgagccaacgagcggtcgtgtcttgatgtggagctcttatcgtaacgatgcgtttcgtgactctcctggcggtattacactgacgagctcatgggaccctagcactggaattgtatccgaacgcactagtaccgttaccgggcacgacatgttttgccccggtatctcgatggacgggaacggtcagatcgtggtcagcggtggtaatgatgcaaagaaaacttccttatatgattcgagctcggactcttggattccgggcccggatatgcaggtcgcgcgtgggtataattcaagtgcgactatgagtgatgggcgcgtatttacgattggcggcagttttagtggcggtgtagttctgaagaacggggaggtttactccccgagctcgaagacttggacttcgctgccgaatgcaaaagttaaccccatgctgaccgccgataaacggggtctgtaccgtagcgataatcatgcttggctgtttgggtggaaaaagggtagcgtcttccaagcaggtccaagtactgccatgaactggtattatacatctgggtcgggggacgttctgagtgcagggaagcgtcaatcagaccgcggagtagccccagacgccatgtgcggtaatgccgtaatgtacgacgcagtcaaaggcaaaattttgactttcgggggctcgcccgattatgaggactcagatgcgactacaaatgcccatattatcacgctgggcgagcctggcacgagtccgaatacggtatttgcgagtaatgggttactgttcgctcgtacctttcatacctcggtggtccttccggacgggagtgtattcatcacaggaggccagcagcgcgcggttccactggaagatagcacacccgtatttactccagagatctacgttcccgaacaagatactttttacaagcaaaacccgaatagtatcgttcgtgcctatcattcgatcagcttgttgctgccggacggacgtgttttcaatggtggcggtggcttatgcggcgattgtgagacgaaccactttgatgcgcaaatctttacgccgaattatctttacgatagcaacgggaacttagccactcgccctaaaatcacccgtacctcaacccagtcagtcaaggtcggcgggtggatcaccatttggactgacatgtcgatctcggccgcaagtttaattcgctacggaactgctactcacacggtgaacaccgatcagcgacgcatcggcttgacgttaacgaacaacggaggtaattcgtacagctttcaagttccgtcggacagcggggttgctcttccgggatactggatgttgttcgttatgaattccgctggtgtaccctccgttgcgtcgacgattaatgttacccagggccaaactggccaccatcaccatcaccattag

SEQ ID NO: 190 - protein, 650 aa, Artificial Sequence
  Engineered variant of Galactose Oxidase from Fusarium graminearum
MASAPIGVAIPRNNWAVTCDSAQSGNECIKAIDGNKDTFWHTQYGVNGDPKPPHTITIDMKTVQNVNGLSVLPRQDGNQNGWIGRHEVYLSSDGVNWGSPVASGSWFADSTTKYSNFETRPARYVRLVAITEANGQPWTSIAEINVFQASSYTAPQPGLGRWGPTIDLPIVPSAAAIEPTSGRVLMWSSYRNDAFRDSPGGITLTSSWDPSTGIVSERTSTVTGHDMFCPGISMDGNGQIVVSGGNDAKKTSLYDSSSDSWIPGPDMQVARGYNSSATMSDGRVFTIGGSFSGGVVLKNGEVYSPSSKTWTSLPNAKVNPMLTADKRGLYRSDNHAWLFGWKKGSVFQAGPSTAMNWYYTSGSGDVLSAGKRQSDRGVAPDAMCGNAVMYDAVKGKILTFGGSPDYEDSDATTNAHIITLGEPGTSPNTVFASNGLLFARTFHTSVVLPDGSVFITGGQQRAVPLEDSTPVFTPEIYVPEQDTFYKQNPNSIVRAYHSISLLLPDGRVFNGGGGLCGDCETNHFDAQIFTPNYLYDSNGNLATRPKITRTSTQSVKVGGWITIWTDMSISAASLIRYGTATHTVNTDQRRIGLTLTNNGGNSYSFQVPSDSGVALPGYWMLFVMNSAGVPSVASTINVTQGQTGHHHHHH

SEQ ID NO: 191 - DNA, 1953 bp, Artificial Sequence
  Engineered variant of Galactose Oxidase from Fusarium graminearum
atggcatcagcaccgatcggggtagccatcccgcgcaacaactgggccgttacatgcgattccgcccagagtgggaatgaatgcattaaggcaattgacggtaataaagacacgttttggcacactcaatatggtgctaacggagatcccaaaccgccgcacaccatcacgatcgatatgaaaacagtacaaaacgtgaatggcctttctgtactgccacgtcaggatggcaatcagaatggatggatcggacgtcacgaggtgtatttaagttctgatggggtgaattggggatcgcctgtagcgtctgggtcctggtttgccgattccaccacaaagtactctaattttgagacacgtccggcccgttacgtgcgccttgtcgccattaccgaagccaatgggcaaccgtggacttcaattgccgagattaacgtatttcaggcgtctagttacactgccccgcagccgggcttggggcgctggggcccgacaatcgatcttcccattgtgccatcggccgccgcaatcgagccaacgagcggtcgtgtcttgatgtggagctcttatcgtaacgatgcgtttcgtgactctcctggcggtattacactgacgagctcatgggaccctagcactggaattgtatccgatcgcactagtaccgttaccgggcacgacatgttttgccccggtatctcgatggacgggaacggtcagatcgtggtcagcggtggtaatgatgcaaagaaaacttccttatatgattcgagctcggactcttggattccgggcccggatatgcaggtcgcgcgtgggtataactcaagtgcgactatgagtgatgggcgcgtatttacgattggcggcagttttagtggcggtcaagttgagaagaacggggaggtttacgagccgagctcgaagacttggacttcgctgccgaatgcaaaagttaaccccatgctgaccgccgataaacggggtctgtaccgtagcgataatcatgcttggctgtttgggtggaaaaagggtagcgtcttccaagcaggtccaagtactgccatgaactggtattatacatctgggtcgggggacgttctgagtgcagggaagcgtcaatcagaccgcggagtagccccagacgccatgtgcggtaatgccgtaatgtacgacgcagtcaaaggcaaaattttgactttcgggggctcgcccgattatgaggactcagatgcgactacaaatgcccatattatcacgctgggcgagcctggcacgagtccgaatacggtatttgcgagtaatgggttactgttcgctcgtacctttcatacctcggtggtccttccggacgggagtgtattcatcacaggaggccagcagcgcgcggttccactggaagatagcacacccgtatttactccagagatctacgttcccgaacaagatactttttacaagcaaaacccgaatagtatcgttcgtgcctatcattcgatcagcttgttgctgccggacggacgtgttttcaatggtggcggtggcttatgcggcgattgtgagacgaaccactttgatgcgcaaatctttacgccgaattatctttacgatagcaacgggaacttagccactcgccctaaaatcacccgtacctcaacccagtcagtcgtcgtcggcgggtggatcaccatttggactgacatgtcgatctcggccgcaagtttaattcgctacggaactgctactcacacggtgaacaccgatcagcgacgcatcggcttgacgttaacgaacaacggaggtaattcgtacagctttcaagttccgtcggacagcggggttgctcttccgggatactggatgttgttcgttatgaattccgctggtgtaccctccgttgcgtcgacgattaacgttacccagggccaaactggccaccatcaccatcaccattag

SEQ ID NO: 192 - protein, 650 aa, Artificial Sequence
  Engineered variant of Galactose Oxidase from Fusarium graminearum
MASAPIGVAIPRNNWAVTCDSAQSGNECIKAIDGNKDTFWHTQYGANGDPKPPHTITIDMKTVQNVNGLSVLPRQDGNQNGWIGRHEVYLSSDGVNWGSPVASGSWFADSTTKYSNFETRPARYVRLVAITEANGQPWTSIAEINVFQASSYTAPQPGLGRWGPTIDLPIVPSAAAIEPTSGRVLMWSSYRNDAFRDSPGGITLTSSWDPSTGIVSDRTSTVTGHDMFCPGISMDGNGQIVVSGGNDAKKTSLYDSSSDSWIPGPDMQVARGYNSSATMSDGRVFTIGGSFSGGQVEKNGEVYEPSSKTWTSLPNAKVNPMLTADKRGLYRSDNHAWLFGWKKGSVFQAGPSTAMNWYYTSGSGDVLSAGKRQSDRGVAPDAMCGNAVMYDAVKGKILTFGGSPDYEDSDATTNAHIITLGEPGTSPNTVFASNGLLFARTFHTSVVLPDGSVFITGGQQRAVPLEDSTPVFTPEIYVPEQDTFYKQNPNSIVRAYHSISLLLPDGRVFNGGGGLCGDCETNHFDAQIFTPNYLYDSNGNLATRPKITRTSTQSVVVGGWITIWTDMSISAASLIRYGTATHTVNTDQRRIGLTLTNNGGNSYSFQVPSDSGVALPGYWMLFVMNSAGVPSVASTINVTQGQTGHHHHHH

SEQ ID NO: 193 - DNA, 1953 bp, Artificial Sequence
  Engineered variant of Galactose Oxidase from Fusarium graminearum
atggcatcagcaccgatcggggtagccatcccgcgcaacaactgggccgttacatgcgattccgcccagagtgggaatgaatgcattaaggcaattgacggtaataaagacacgttttggcacactcaatatggtgtgaacggagatcccaaaccgccgcacaccatcacgatcgatatgaaaacagtacaaaacgtgaatggcctttctgtactgccacgtcaggatggcaatcagaatggatggatcggacgtcacgaggtgtatttaagttctgatggggtgaattggggatcgcctgtagcgtctgggtcctggtttgccgattccaccacaaagtactctaattttgagacacgtccggcccgttacgtgcgccttgtcgccattaccgaagccaatgggcaaccgtggacttcaattgccgagattaacgtatttcaggcgtctagttacactgccccgcagccgggcttggggcgctggggcccgacaatcgatcttcccattgtgccatcggccgccgcaatcgagccaacgagcggtcgtgtcttgatgtggagctcttatcgtaacgatgcgtttcgtgactctcctggcggtattacactgacgagctcatgggaccctagcactggaattgtatccgatcgcactagtaccgttaccgggcacgacatgttttgccccggtatctcgatggacgggaacggtcagatcgtggtcagcggtggtaatgatgcaaagaaaacttccttatatgattcgagctcggactcttggattccgggcccggatatgcaggtcgcgcgtgggtataactcaagtgcgactatgagtgatgggcgcgtatttacgattggcggcagttttagtggcggtcaagttctgaagaacggggaggtttactccccgagctcgaagacttggacttcgctgccgaatgcaaaagttaaccccatgctgaccgccgataaacggggtctgtaccgtagcgataatcatgcttggctgtttgggtggaaaaagggtagcgtcttccaagcaggtccaagtactgccatgaactggtattatacatctgggtcgggggacgttctgagtgcagggaagcgtcaatcagaccgcggagtagccccagacgccatgtgcggtaatgccgtaatgtacgacgcagtcaaaggcaaaattttgactttcgggggctcgcccgattatgaggactcagatgcgactacaaatgcccatattatcacgctgggcgagcctggcacgagtccgaatacggtatttgcgagtaatgggttactgttcgctcgtacctttcatacctcggtggtccttccggacgggagtgtattcatcacaggaggccagcagcgcgcggttccactggaagatagcacacccgtatttactccagagatctacgttcccgaacaagatactttttacaagcaaaacccgaatagtatcgttcgtgcctatcattcgatcagcttgttgctgccggacggacgtgttttcaatggtggcggtggcttatgcggcgattgtgagacgaaccactttgatgcgcaaatctttacgccgaattatctttacgatagcaacgggaacttagccactcgccctaaaatcacccgtacctcaacccagtcagtcgtggtcggcgggtggatcaccatttggactgacatgtcgatctcggccgcaagtttaattcgctacggaactgctactcacacggtgaacaccgatcagcgacgcatcggcttgacgttaacgaacaacggaggtaattcgtacagctttcaagttccgtcggacagcggggttgctcttccgggatactggatgttgttcgttatgaattccgctggtgtaccctccgttgcgtcgacgattaacgttacccagggccaaactagccaccatcaccatcaccattag

SEQ ID NO: 194 - protein, 650 aa, Artificial Sequence
  Engineered variant of Galactose Oxidase from Fusarium graminearum
MASAPIGVAIPRNNWAVTCDSAQSGNECIKAIDGNKDTFWHTQYGVNGDPKPPHTITIDMKTVQNVNGLSVLPRQDGNQNGWIGRHEVYLSSDGVNWGSPVASGSWFADSTTKYSNFETRPARYVRLVAITEANGQPWTSIAEINVFQASSYTAPQPGLGRWGPTIDLPIVPSAAAIEPTSGRVLMWSSYRNDAFRDSPGGITLTSSWDPSTGIVSDRTSTVTGHDMFCPGISMDGNGQIVVSGGNDAKKTSLYDSSSDSWIPGPDMQVARGYNSSATMSDGRVFTIGGSFSGGQVLKNGEVYSPSSKTWTSLPNAKVNPMLTADKRGLYRSDNHAWLFGWKKGSVFQAGPSTAMNWYYTSGSGDVLSAGKRQSDRGVAPDAMCGNAVMYDAVKGKILTFGGSPDYEDSDATTNAHIITLGEPGTSPNTVFASNGLLFARTFHTSVVLPDGSVFITGGQQRAVPLEDSTPVFTPEIYVPEQDTFYKQNPNSIVRAYHSISLLLPDGRVFNGGGGLCGDCETNHFDAQIFTPNYLYDSNGNLATRPKITRTSTQSVVVGGWITIWTDMSISAASLIRYGTATHTVNTDQRRIGLTLTNNGGNSYSFQVPSDSGVALPGYWMLFVMNSAGVPSVASTINVTQGQTSHHHHHH

SEQ ID NO: 195 - DNA, 1953 bp, Artificial Sequence
  Engineered variant of Galactose Oxidase from Fusarium graminearum
atggcatcagcaccgatcggggtagccatcccgcgcaacaactgggccgttacatgcgattccgcccagagtgggaatgaatgcattaaggcaattgacggtaataaagacacgttttggcacactcaatatggtgtaaacggagatcccaaaccgccgcacaccatcacgatcgatatgaaaacagtacaaaacgtgaatggcctttctgtactgccacgtcaggatggcaatcagaatggatggatcggacgtcacgaggtgtatttaagttctgatggggtgaattggggatcgcctgtagcgtctgggtcctggtttgccgattccaccacaaagtactctaattttgagacacgtccggcccgttacgtgcgccttgtcgccattaccgaagccaatgggcaaccgtggacttcaattgccgagattaacgtatttcaggcgtctagttacactgccccgcagccgggcttggggcgctggggcccgacaatcgatcttcccattgtgccatcggccgccgcaatcgagccaacgagcggtcgtgtcttgatgtggagctcttatcgtcaagatgcgtttcgtgactctcctggcggtattacactgacgagctcatgggaccctagcactggaattgtatccgatcgcactagtaccgttaccgggcacgacatgttttgccccggtatctcgatggacgggaacggtcagatcgtggtcagcggtggtaatgatgcaaagaaaacttccttatatgattcgagctcggactcttggattccgggcccggatatgcaggtcgcgcgtgggtataactcaagtgcgactatgagtgatgggcgcgtatttacgattggcggcagttttagtggcggtcaagttgagaagaacggggaggtttactccccgagctcgaagacttggacttcgctgccgaatgcaaaagttaaccccatgctgaccgccgataaacggggtctgtaccgtagcgataatcatgcttggctgtttgggtggaaaaagggtagcgtcttccaagcaggtccaagtactgccatgaactggtattatacatctgggtcgggggacgttaagagtgcagggaagcgtcaatcaaaccgcggagtagccccagacgccatgtgcggtaatgccgtaatgtacgacgcagtcaaaggcaaaattttgactttcgggggctcgcccgattatgaggactcagatgcgactacaaatgcccatattatcacgctgggcgagcctggcacgagtccgaatacggtatttgcgagtaatgggttactgttcgctcgtacctttcatacctcggtggtccttccggacgggagtgtattcatcacaggaggccagcagcgcgcggttccactggaagatagcacacccgtatttactccagagatctacgttcccgaacaagatactttttacaagcaaaacccgaatagtatcgttcgtgcctatcattcgatcagcttgttgctgccggacggacgtgttttcaatggtggcggtggcttatgcggcgattgtgagacgaaccactttgatgcgcaaatctttacgccgaattatctttacgatagcaacgggaacttagccactcgccctaaaatcacccgtacctcaacccagtcagtcgtggtcggcgggtggatcaccatttggactgacatgtcgatctcggccgcaagtttaattcgctacggaactgctactcacacggtgaacaccgatcagcgacgcatcggcttgacgttaacgaacaacggaggtaattcgtacagctttcaagttccgtcggacagcggggttgctcttccgggatactggatgttgttcgttatgaattccgctggtgtaccctccgttgcgtcgacgattaacgttacccagggccaaactggccaccatcaccatcaccattag

SEQ ID NO: 196 - protein, 650 aa, Artificial Sequence
  Engineered variant of Galactose Oxidase from Fusarium graminearum
MASAPIGVAIPRNNWAVTCDSAQSGNECIKAIDGNKDTFWHTQYGVNGDPKPPHTITIDMKTVQNVNGLSVLPRQDGNQNGWIGRHEVYLSSDGVNWGSPVASGSWFADSTTKYSNFETRPARYVRLVAITEANGQPWTSIAEINVFQASSYTAPQPGLGRWGPTIDLPIVPSAAAIEPTSGRVLMWSSYRQDAFRDSPGGITLTSSWDPSTGIVSDRTSTVTGHDMFCPGISMDGNGQIVVSGGNDAKKTSLYDSSSDSWIPGPDMQVARGYNSSATMSDGRVFTIGGSFSGGQVEKNGEVYSPSSKTWTSLPNAKVNPMLTADKRGLYRSDNHAWLFGWKKGSVFQAGPSTAMNWYYTSGSGDVKSAGKRQSNRGVAPDAMCGNAVMYDAVKGKILTFGGSPDYEDSDATTNAHIITLGEPGTSPNTVFASNGLLFARTFHTSVVLPDGSVFITGGQQRAVPLEDSTPVFTPEIYVPEQDTFYKQNPNSIVRAYHSISLLLPDGRVFNGGGGLCGDCETNHFDAQIFTPNYLYDSNGNLATRPKITRTSTQSVVVGGWITIWTDMSISAASLIRYGTATHTVNTDQRRIGLTLTNNGGNSYSFQVPSDSGVALPGYWMLFVMNSAGVPSVASTINVTQGQTGHHHHHH

SEQ ID NO: 197 - DNA, 1953 bp, Artificial Sequence
  Engineered variant of Galactose Oxidase from Fusarium graminearum
atggcatcagcaccgatcggggtagccatcccgcgcaacaactgggccgttacatgcgattccgcccagagtgggaatgaatgcattaaggcaattgacggtaataaagacacgttttggcacactcaatatggtgtgaacggagatcccaaaccgccgcacaccatcacgatcgatatgaaaacagtacaaaacgtgaatggcctttctgtactgccacgtcaggatggcaatcagaatggatggatcggacgtcacgaggtgtatttaagttctgatggggtgaattggggatcgcctgtagcgtctgggtcctggtttgccgattccaccacaaagtactctaattttgagacacgtccggcccgttacgtgcgccttgtcgccattaccgaagccaatgggcaaccgtggacttcaattgccgagattaacgtatttcaggcgtctagttacactgccccgcagccggagttggggcgctggggcccgacaatcgatcttcccattgtgccatcggccgccgcaatcgagccaacgagcggtcgtgtcttgatgtggagctcttatcgtcaggatgcgtttcgtgactctcctggcggtattacactgacgagctcatgggaccctagcactggaattgtatccgatcgcactagtaccgttaccgggcacgacatgttttgccccggtatctcgatggacgggaacggtcagatcgtggtcagcggtggtaatgatgcaaagaaaacttccttatatgattcgagctcggactcttggattccgggcccggatatgcaggtcgcgcgtgggtataattcaagtgcgactatgagtgatgggcgcgtatttacgattggcggcagttttagtggcggtcaagttgagaagaacggggaggtttactcgccgagctcgaagacttggacttcgctgccgaatgcaaaagttaaccccatgctgaccgccgataaacggggtctgtaccgtagcgataatcatgcttggctgtttgggtggaaaaagggtagcgtcttccaagcaggtccaagtactgccatgaactggtattatacatctgggtcgggggacgttaagagtgcagggaagcgtcaatcagaccgcggagtagccccagacgccatgtgcggtaatgccgtaatgtacgacgcagtcaaaggcaaaattttgactttcgggggctcgcccgattatgaggactcagatgcgactacaaatgcccatattatcacgctgggcgagcctggcacgagtccgaatacggtatttgcgagtaatgggttactgttcgctcgtacctttcatacctcggtggtccttccggacgggagtgtattcatcacaggaggccagcagcgcgcggttccactggaagatagcacacccgtatttactccagagatctacgttcccgaacaagatactttttacaagcaaaacccgaatagtatcgttcgtgcctatcattcgatcagcttgttgctgccggacggacgtgttttcaatggtggcggtggcttatgcggcgattgtgagacgaaccactttgatgcgcaaatctttacgccgaattatctttacgatagcaacgggaacttagccactcgccctaaaatcacccgtacctcaacccagtcagtcgtcgtcggcgggtggatcaccatttggactgacatgtcgatctcggccgcaagtttaattcgctacggaactgctactcacacggtgaacaccgatcagcgacgcatcggcttgacgttaacgaacaacggaggtaattcgtacagctttcaagttccgtcggacagcggggttgctcttccgggatactggatgttgttcgttatgaattccgctggtgtaccctccgttgcgtcgacgattcgtgttacccagggccaaactggccaccatcaccatcaccattag

SEQ ID NO: 198 - protein, 650 aa, Artificial Sequence
  Engineered variant of Galactose Oxidase from Fusarium graminearum
MASAPIGVAIPRNNWAVTCDSAQSGNECIKAIDGNKDTFWHTQYGVNGDPKPPHTITIDMKTVQNVNGLSVLPRQDGNQNGWIGRHEVYLSSDGVNWGSPVASGSWFADSTTKYSNFETRPARYVRLVAITEANGQPWTSIAEINVFQASSYTAPQPELGRWGPTIDLPIVPSAAAIEPTSGRVLMWSSYRQDAFRDSPGGITLTSSWDPSTGIVSDRTSTVTGHDMFCPGISMDGNGQIVVSGGNDAKKTSLYDSSSDSWIPGPDMQVARGYNSSATMSDGRVFTIGGSFSGGQVEKNGEVYSPSSKTWTSLPNAKVNPMLTADKRGLYRSDNHAWLFGWKKGSVFQAGPSTAMNWYYTSGSGDVKSAGKRQSDRGVAPDAMCGNAVMYDAVKGKILTFGGSPDYEDSDATTNAHIITLGEPGTSPNTVFASNGLLFARTFHTSVVLPDGSVFITGGQQRAVPLEDSTPVFTPEIYVPEQDTFYKQNPNSIVRAYHSISLLLPDGRVFNGGGGLCGDCETNHFDAQIFTPNYLYDSNGNLATRPKITRTSTQSVVVGGWITIWTDMSISAASLIRYGTATHTVNTDQRRIGLTLTNNGGNSYSFQVPSDSGVALPGYWMLFVMNSAGVPSVASTIRVTQGQTGHHHHHH

SEQ ID NO: 199 - DNA, 1953 bp, Artificial Sequence
  Engineered variant of Galactose Oxidase from Fusarium graminearum
atggcatcagcaccgatcggggtagccatcccgcgcaacaactgggccgttacatgcgattccgcccagagtgggaatgaatgcattaaggcaattgacggtaataaagacacgttttggcacactcaatatggtgtaaacggagatcccaaaccgccgcacaccatcacgatcgatatgaaaacagtacaaaacgtgaatggcctttctgtactgccacgtcaggatggcaatcagaatggatggatcggacgtcacgaggtgtatttaagttctgatggggtgaattggggatcgcctgtagcgtctgggtcctggtttgccgattccaccacaaagtactctaattttgagacacgtccggcccgttacgtgcgccttgtcgccattaccgaagccaatgggcaaccgtggacttcaattgccgagattaacgtatttcaggcgtctagttacactgccccgcagccgggcttggggcgctggggcccgacaatcgatcttcccattgtgccatcggccgccgcaatcgagccaacgagcggtcgtgtcttgatgtggagctcttatcgtcaggatgcgtttcgtgactctcctggcggtattacactgacgagctcatgggaccctagcactggaattgtatccgatcgcactagtaccgttaccgggcacgacatgttttgccccggtatctcgatggacgggaacggtcagatcgtggtcagcggtggtaatgatgcaaagaaaacttccttatatgattcgagctcggactcttggattccgggcccggatatgcaggtcgcgcgtgggtataactcaagtgcgactatgagtgatgggcgcgtatttacgattggcggcagttttagtggcggtcaagttgagaagaacggggaggtttactccccgagctcgaagacttgggcgtcgctgccgaatgcaaaagttaaccccatgctgaccgccgataaacggggtctgtaccgtagcgataatcatgcttggctgtttgggtggaaagagggtagcgtcttccaagcaggtccaagtactgccatgaactggtattatacatctgggtcgggggacgttaagtcggcagggaagcgtcaatcagaccgcggagtagccccagacgccatgtgcggtaatgccgtaatgtacgacgcagtcaaaggcaaaattttgactttcgggggctcgcccgattatgaggactcagatgcgactacaaatgcccatattatcacgctgggcgagcctggcacgagtccgaatacggtatttgcgagtaatgggttactgttcgctcgtacctttcatacctcggtggtccttccggacgggagtgtattcatcacaggaggccagcagcgcgcggttccactggaagatagcacacccgtatttactccagagatctacgttcccgaacaagatactttttacaagcaaaacccgaatagtatcgttcgtgcctatcattcgatcagcttgttgctgccggacggacgtgttttcaatggtggcggtggcttatgcggcgattgtgagacgaaccactttgatgcgcaaatctttacgccgaattatctttacgatagcaacgggaacttagccactcgccctaaaatcacccgtctgtcaacccagtcagtcgtggtcggcgggtggatcaccatttggactgacatgtcgatctcggccgcaagtttaattcgctacggaactgctactcacacggtgaacaccgatcagcgacgcatcggcttgacgttaacgaacaacggaggtaattcgtacagctttcaagttccgtcggacagcggggttgctcttccgggatactggatgttgttcgttatgaattccgctggtgtaccctccgttgcgtcgacgattaacgttacccagggccaaactggccaccatcaccatcaccattag

SEQ ID NO: 200 - protein, 650 aa, Artificial Sequence
  Engineered variant of Galactose Oxidase from Fusarium graminearum
MASAPIGVAIPRNNWAVTCDSAQSGNECIKAIDGNKDTFWHTQYGVNGDPKPPHTITIDMKTVQNVNGLSVLPRQDGNQNGWIGRHEVYLSSDGVNWGSPVASGSWFADSTTKYSNFETRPARYVRLVAITEANGQPWTSIAEINVFQASSYTAPQPGLGRWGPTIDLPIVPSAAAIEPTSGRVLMWSSYRQDAFRDSPGGITLTSSWDPSTGIVSDRTSTVTGHDMFCPGISMDGNGQIVVSGGNDAKKTSLYDSSSDSWIPGPDMQVARGYNSSATMSDGRVFTIGGSFSGGQVEKNGEVYSPSSKTWASLPNAKVNPMLTADKRGLYRSDNHAWLFGWKEGSVFQAGPSTAMNWYYTSGSGDVKSAGKRQSDRGVAPDAMCGNAVMYDAVKGKILTFGGSPDYEDSDATTNAHIITLGEPGTSPNTVFASNGLLFARTFHTSVVLPDGSVFITGGQQRAVPLEDSTPVFTPEIYVPEQDTFYKQNPNSIVRAYHSISLLLPDGRVFNGGGGLCGDCETNHFDAQIFTPNYLYDSNGNLATRPKITRLSTQSVVVGGWITIWTDMSISAASLIRYGTATHTVNTDQRRIGLTLTNNGGNSYSFQVPSDSGVALPGYWMLFVMNSAGVPSVASTINVTQGQTGHHHHHH

SEQ ID NO: 201 - DNA, 1953 bp, Artificial Sequence
  Engineered variant of Galactose Oxidase from Fusarium graminearum
atggcatcagcaccgatcggggtagccatcccgcgcaacaactgggccgttacatgcgattccgcccaggaggggaatgaatgcattaaggcaattgacggtaataaagacacgttttggcacactcaatatggtgtaaacggagatcccaagctgccgcacaccatcacgatcgatatgaaaacagtacaaaacgtgaatggcctttctgtactgccacgtcaggatggcaatcagaatggatggatcggacgtcacgaggtgtatttaagttctgatggggtgaattggggatcgcctgtagcgtctgggtcctggtttgccgattccaccacaaagtactctaattttgagacacgtccggcccgttacgtgcgccttgtcgccattaccgaagccaatgggcaaccgtggacttcaattgccgagattaacgtatttcaggcgtctagttacactgccccgcagccgggcttggggcgctggggcccgacaatcgatcttcccattgtgccatcggccgccgcaatcgagccaacgagcggtcgtgtcttgatgtggagctcttatcgtcaggatgcgtttcgtgactctcctggcggtattacactgacgagctcatgggaccctagcactggaattgtatccgatcgcactagtaccgttaccgggcacgacatgttttgccccggtatctcgatggacgggaacggtcagatcgtggtcagcggtggtaatgatgcaaagaaaacttccttatatgattcgagctcggactcttggattccgggcccggatatgcaggtcgcgcgtgggtataactcaagtgcgactatgagtgatgggcgcgtatttacgattggcggcagttttagtggcggtcaagttgagaagaacggggaggtttactccccgagctcgaagacttgggcgtcgctgccgaatgcaaaagttaaccccatgctgaccgccgataaacggggtctgtaccgtagcgataatcatgcttggctgtttgggtggaaaaagggtagcgtcttccaagcaggtccaagtactgccatgaactggtattatacatctgggtcgggggacgttaagagtgcagggaagcgtcaatcagaccgcggagtagccccagacgccatgtgcggtaatgccgtaatgtacgacgcagtcaaaggcaaaattttgactttcgggggctcgcccgattatgaggactcagatgcgactacaaatgcccatattatcacgctgggcgagcctggcacgagtccgaatacggtatttgcgagtaatgggttactgttcgctcgtacctttcatacctcggtggtccttccggacgggagtgtattcatcacaggaggccagcagcgcgcggttccactggaagatagcacacccgtatttactccagagatctacgttcccgaacaagatactttttacaagcaaaacccgaatagtatcgttcgtgcctatcattcgatcagcttgttgctgccggacggacgtgttttcaatggtggcggtggcttatgcggcgattgtgagacgaaccactttgatgcgcaaatctttacgccgaattatctttacgatagcaacgggaacttagccactcgccctaaaatcacccgtgtttcaacccagtcagtcgtggtcggcgggtggatcaccatttggactgacatgtcgatctcggccgcaagtttaattcgctacggaactgctactcacacggtgaacaccgatcagcgacgcatcggcttgacgttaacgaacaacggaggtaattcgtacagctttcaagttccgtcggacagcggggttgctcttccgggatactggatgttgttcgttatgaattccgctggtgtaccctccgttgcgtcgacgattaacgttacccagggccaaactggccaccatcaccatcaccattag

SEQ ID NO: 202 - protein, 650 aa, Artificial Sequence
  Engineered variant of Galactose Oxidase from Fusarium graminearum
MASAPIGVAIPRNNWAVTCDSAQEGNECIKAIDGNKDTFWHTQYGVNGDPKLPHTITIDMKTVQNVNGLSVLPRQDGNQNGWIGRHEVYLSSDGVNWGSPVASGSWFADSTTKYSNFETRPARYVRLVAITEANGQPWTSIAEINVFQASSYTAPQPGLGRWGPTIDLPIVPSAAAIEPTSGRVLMWSSYRQDAFRDSPGGITLTSSWDPSTGIVSDRTSTVTGHDMFCPGISMDGNGQIVVSGGNDAKKTSLYDSSSDSWIPGPDMQVARGYNSSATMSDGRVFTIGGSFSGGQVEKNGEVYSPSSKTWASLPNAKVNPMLTADKRGLYRSDNHAWLFGWKKGSVFQAGPSTAMNWYYTSGSGDVKSAGKRQSDRGVAPDAMCGNAVMYDAVKGKILTFGGSPDYEDSDATTNAHIITLGEPGTSPNTVFASNGLLFARTFHTSVVLPDGSVFITGGQQRAVPLEDSTPVFTPEIYVPEQDTFYKQNPNSIVRAYHSISLLLPDGRVFNGGGGLCGDCETNHFDAQIFTPNYLYDSNGNLATRPKITRVSTQSVVVGGWITIWTDMSISAASLIRYGTATHTVNTDQRRIGLTLTNNGGNSYSFQVPSDSGVALPGYWMLFVMNSAGVPSVASTINVTQGQTGHHHHHH

SEQ ID NO: 203 - DNA, 1953 bp, Artificial Sequence
  Engineered variant of Galactose Oxidase from Fusarium graminearum
atggcatcagcaccgatcggggtagccatcccgcgcaacaactgggccgttacatgcgattccgcccagagtgggaatgaatgcattaaggcaattgacggtaataaagacacgttttggcacactcaatatggtgctaacggagatcccaaaccgccgcacaccatcacgatcgatatgaaaacagtacaaaacgtgaatggcctttctgtactgccacgtcaggatggcaatcagaatggatggatcggacgtcacgaggtgtatttaagttctgatggggtgaattggggatcgcctgtagcgtctgggtcctggtttgccgattccaccacaaagtactctaattttgagacacgtccggcccgttacgtgcgccttgtcgccattaccgaagccaatgggcaaccgtggacttcaattgccgagattaacgtatttcaggcgtctagttacactgccccgcagccgggcttggggcgctggggcccgacaatcgatcttcccattgtgccatcggccgccgcaatcgagccaacgagcggtcgtgtcttgatgtggagctcttatcgtaacgatgcgtttcgtgactctcctggcggtattacactgacgagctcatgggaccctagcactggaattgtatccgatcgcactagtaccgttaccgggcacgacatgttttgccccggtatctcgatggacgggaacggtcagatcgtggtcagcggtggtaatgatgcaaagaaaacttccttatatgattcgagctcggactcttggattccgggcccggatatgcaggtcgcgcgtgggtataactcaagtgcgactatgagtgatgggcgcgtatttacgattggcggcagttttagtggcggtcaagttgagaagaacggggaggtttactccccgagctcgaagacttggacttcgctgccgaatgcaaaagttaaccccatgctgaccgccgataaacggggtctgtaccgtagcgataatcatgcttggctgtttgggtggaaaaagggtagcgtcttccaagcaggtccaagtactgccatgaactggtattatacatctgggtcgggggacgttaagagtgcagggaagcgtcaatcagaccgcggagtagccccagacgccatgtgcggtaatgccgtaatgtacgacgcagtcaaaggcaaaattttgactttcgggggctcgcccgattatgaggactcagatgcgactacaaatgcccatattatcacgctgggcgagcctggcacgagtccgaatacggtatttgcgagtaatgggttactgttcgctcgtacctttcatacctcggtggtccttccggacgggagtgtattcatcacaggaggccagcagcgcgcggttccactggaagatagcacacccgtatttactccagagatctacgttcccgaacaagatactttttacaagcaaaacccgaatagtatcgttcgtgcctatcattcgatcagcttgttgctgccggacggacgtgttttcaatggtggcggtggcttatgcggcgattgtgagacgaaccactttgatgcgcaaatctttacgccgaattatctttacgatagcaacgggaacttagccactcgccctaaaatcacccgtacctcaacccagtcagtcgtcgtcggcgggtggatcaccatttggactgacatgtcgatctcggccgcaagtttaattcgctacggaactgctactcacacggtgaacaccgatcagcgacgcatcggcttgacgttaacgaacaacggaggtaattcgtacagctttcaagttccgtcggacagcggggttgctcttccgggatactggatgttgttcgttatgaattccgctggtgtaccctccgttgcgtcgacgattaacgttacccagggccaaactggccaccatcaccatcaccattag

SEQ ID NO: 204 - protein, 650 aa, Artificial Sequence
  Engineered variant of Galactose Oxidase from Fusarium graminearum
MASAPIGVAIPRNNWAVTCDSAQSGNECIKAIDGNKDTFWHTQYGANGDPKPPHTITIDMKTVQNVNGLSVLPRQDGNQNGWIGRHEVYLSSDGVNWGSPVASGSWFADSTTKYSNFETRPARYVRLVAITEANGQPWTSIAEINVFQASSYTAPQPGLGRWGPTIDLPIVPSAAAIEPTSGRVLMWSSYRNDAFRDSPGGITLTSSWDPSTGIVSDRTSTVTGHDMFCPGISMDGNGQIVVSGGNDAKKTSLYDSSSDSWIPGPDMQVARGYNSSATMSDGRVFTIGGSFSGGQVEKNGEVYSPSSKTWTSLPNAKVNPMLTADKRGLYRSDNHAWLFGWKKGSVFQAGPSTAMNWYYTSGSGDVKSAGKRQSDRGVAPDAMCGNAVMYDAVKGKILTFGGSPDYEDSDATTNAHIITLGEPGTSPNTVFASNGLLFARTFHTSVVLPDGSVFITGGQQRAVPLEDSTPVFTPEIYVPEQDTFYKQNPNSIVRAYHSISLLLPDGRVFNGGGGLCGDCETNHFDAQIFTPNYLYDSNGNLATRPKITRTSTQSVVVGGWITIWTDMSISAASLIRYGTATHTVNTDQRRIGLTLTNNGGNSYSFQVPSDSGVALPGYWMLFVMNSAGVPSVASTINVTQGQTGHHHHHH

SEQ ID NO: 205 - DNA, 1953 bp, Artificial Sequence
  Engineered variant of Galactose Oxidase from Fusarium graminearum
atggcatcagcaccgatcggggtagccatcccgcgcaacaactgggccgttacatgcgattccgcccagagtgggaatgaatgcattaaggcaattgacggtaataaagacacgttttggcacactcaatatggtgtgaacggagatcccaaaccgccgcacaccatcacgatcgatatgaaaacagtacaaaacgtgaatggcctttctgtactgccacgtcaggatggcaatcagaatggatggatcggacgtcacgaggtgtatttaagttctgatggggtgaattggggatcgcctgtagcgtctgggtcctggtttgccgattccaccacaaagtactctaattttgagacacgtccggcccgttacgtgcgccttgtcgccattaccgaagccaatgggcaaccgtggacttcaattgccgagattaacgtatttcaggcgtctagttacactgccccgcagccgggcttggggcgctggggcccgacaatcgatcttcccattgtgccatcggccgccgcaatcgagccaacgagcggtcgtgtcttgatgtggagctcttatcgtcaggatgcgtttcgtgactctcctggcggtattacactgacgagctcatgggaccctagcactggaattgtatccgatcgcactagtaccgttaccgggcacgacatgttttgccccggtatctcgatggacgggaacggtcagatcgtggtcagcggtggtaatgatgcaaagaaaacttccttatatgattcgagctcggactcttggattccgggcccggatatgcaggtcgcgcgtgggtataattcaagtgcgactatgagtgatgggcgcgtatttacgattggcggcagttttagtggcggtcaagttgagaagaacggggaggtttactcgccgagctcgaagacttggacttcgctgccgaatgcaaaagttaaccccatgctgaccgccgataaacggggtctgtaccgtagcgataatcatgcttggctgtttgggtggaaaaagggtagcgtcttccaagcaggtccaagtactgccatgaactggtattatacatctgggtcgggggacgttaagagtgcagggaagcgtcaatcagaccgcggagtagccccagacgccatgtgcggtaatgccgtaatgtacgacgcagtcaaaggcaaaattttgactttcgggggctcgcccgattatgaggactcagatgcgactacaaatgcccatattatcacgctgggcgagcctggcacgctgccgaatacggtatttgcgagtaatgggttactgttcgctcgtacctttcatacctcggtggtccttccggacgggagtgtattcatcacaggaggccagcagcgcgcggttccactggaagatagcacacccgtatttactccagagatctacgttcccgaacaagatactttttacaagcaaaacccgaatagtatcgttcgtgcctatcattcgatcagcttgttgctgccggacggacgtgttttcaatggtggcggtggcttatgcggcgattgtgagacgaaccactttgatgcgcaaatctttacgccgaattatctttacgatagcaacgggaacttagccactcgccctaaaatcacccgtacctcaacccagtcagtcgtcgtcggcgggtggatcaccatttggactgacatgtcgatctcggccgcaagtttaattcgctacggaactgctactcacacggtgaacaccgatcagcgacgcatcggcttgacgttaacgaacaacggaggtaattcgtacagctttcaagttccgtcggacagcggggttgctcttccgggatactggatgttgttcgttatgaattccgctggtgtaccctccgttgcgtcgacgattaacgttacccagggccaaactggccaccatcaccatcaccattag

SEQ ID NO: 206 - protein, 650 aa, Artificial Sequence
  Engineered variant of Galactose Oxidase from Fusarium graminearum
MASAPIGVAIPRNNWAVTCDSAQSGNECIKAIDGNKDTFWHTQYGVNGDPKPPHTITIDMKTVQNVNGLSVLPRQDGNQNGWIGRHEVYLSSDGVNWGSPVASGSWFADSTTKYSNFETRPARYVRLVAITEANGQPWTSIAEINVFQASSYTAPQPGLGRWGPTIDLPIVPSAAAIEPTSGRVLMWSSYRQDAFRDSPGGITLTSSWDPSTGIVSDRTSTVTGHDMFCPGISMDGNGQIVVSGGNDAKKTSLYDSSSDSWIPGPDMQVARGYNSSATMSDGRVFTIGGSFSGGQVEKNGEVYSPSSKTWTSLPNAKVNPMLTADKRGLYRSDNHAWLFGWKKGSVFQAGPSTAMNWYYTSGSGDVKSAGKRQSDRGVAPDAMCGNAVMYDAVKGKILTFGGSPDYEDSDATTNAHIITLGEPGTLPNTVFASNGLLFARTFHTSVVLPDGSVFITGGQQRAVPLEDSTPVFTPEIYVPEQDTFYKQNPNSIVRAYHSISLLLPDGRVFNGGGGLCGDCETNHFDAQIFTPNYLYDSNGNLATRPKITRTSTQSVVVGGWITIWTDMSISAASLIRYGTATHTVNTDQRRIGLTLTNNGGNSYSFQVPSDSGVALPGYWMLFVMNSAGVPSVASTINVTQGQTGHHHHHH

SEQ ID NO: 207 - DNA, 1953 bp, Artificial Sequence
  Engineered variant of Galactose Oxidase from Fusarium graminearum
atggcatcagcaccgatcggggtagccatcccgcgcaacaactgggccgttacatgcgattccgcccagagtgggaatgaatgcattaaggcaattgacggtaataaagacacgttttggcacactcaatatggtgtgaacggagatcccaaaccgccgcacaccatcacgatcgatatgaaaacagtacaaaacgtgaatggcctttctgtactgccacgtcaggatggcaatcagaatggatggatcggacgtcacgaggtgtatttaagttctgatggggtgaattggggatcgcctgtagcgtctgggtcctggtttgccgattccaccacaaagtactctaattttgagacacgtccggcccgttacgtgcgccttgtcgccattaccgaagccaatgggcaaccgtggacttcaattgccgagattaacgtatttcaggcgtctagttacactgccccgcagccgggcttggggcgctggggcccgacaatcgatcttcccattgtgccatcggccgccgcaatcgagccaacgagcggtcgtgtcttgatgtggagctcttatcgtcaagatgcgtttcgtgactctcctggcggtattacactgacgagctcatgggaccctagcactggaattgtatccgatcgcactagtaccgttaccgggcacgacatgttttgccccggtatctcgatggacgggaacggtcagatcgtggtcagcggtggtaatgatgcaaagaaaacttccttatatgattcgagctcggactcttggattccgggcccggatatgcaggtcgcgcgtgggtatcaatcaagtgcgactatgagtgatgggcgcgtatttacgattggcggcagttttagtggcggtcaagttgagaagaacggggaggtttacgagccgagctcgaagacttggacttcgctgccgaatgcaaaagttaaccccatgctgaccgccgataaacggggtctgtaccgtagcgataatcatgcttggctgtttgggtggaaaaagggtagcgtcttccaagcaggtccaagtactgccatgaactggtattatacatctgggtcgggggacgttctgagtgcagggaagcgtcaatcagaccgcggagtagccccagacgccatgtgcggtaatgccgtaatgtacgacgcagtcaaaggcaaaattttgactttcgggggctcgcccgattatgaggactcagatgcgactacaaatgcccatattatcacgctgggcgagcctggcacgctgccgaatacggtatttgcgagtaatgggttactgttcgctcgtacctttcatacctcggtggtccttccggacgggagtgtattcatcacaggaggccagcagcgcgcggttccactggaagatagcacacccgtatttactccagagatctacgttcccgaacaagatactttttacaagcaaaacccgaatagtatcgttcgtgcctatcattcgatcagcttgttgctgccggacggacgtgttttcaatggtggcggtggcttatgcggcgattgtgagacgaaccactttgatgcgcaaatctttacgccgaattatctttacgatagcaacgggaacttagccactcgccctaaaatcacccgtacctcaacccagtcagtcaaggtcggcgggtggatcaccatttggactgacatgtcgatctcggccgcaagtttaattcgctacggaactgctactcacacggtgaacaccgatcagcgacgcatcggcttgacgttaacgaacaacggaggtaattcgtacagctttcaagttccgtcggacagcggggttgctcttccgggatactggatgttgttcgttatgaattccgctggtgtaccctccgttgcgtcgacgattaacgttacccagggccaaactggccaccatcaccatcaccattag

SEQ ID NO: 208 - protein, 650 aa, Artificial Sequence
  Engineered variant of Galactose Oxidase from Fusarium graminearum
MASAPIGVAIPRNNWAVTCDSAQSGNECIKAIDGNKDTFWHTQYGVNGDPKPPHTITIDMKTVQNVNGLSVLPRQDGNQNGWIGRHEVYLSSDGVNWGSPVASGSWFADSTTKYSNFETRPARYVRLVAITEANGQPWTSIAEINVFQASSYTAPQPGLGRWGPTIDLPIVPSAAAIEPTSGRVLMWSSYRQDAFRDSPGGITLTSSWDPSTGIVSDRTSTVTGHDMFCPGISMDGNGQIVVSGGNDAKKTSLYDSSSDSWIPGPDMQVARGYQSSATMSDGRVFTIGGSFSGGQVEKNGEVYEPSSKTWTSLPNAKVNPMLTADKRGLYRSDNHAWLFGWKKGSVFQAGPSTAMNWYYTSGSGDVLSAGKRQSDRGVAPDAMCGNAVMYDAVKGKILTFGGSPDYEDSDATTNAHIITLGEPGTLPNTVFASNGLLFARTFHTSVVLPDGSVFITGGQQRAVPLEDSTPVFTPEIYVPEQDTFYKQNPNSIVRAYHSISLLLPDGRVFNGGGGLCGDCETNHFDAQIFTPNYLYDSNGNLATRPKITRTSTQSVKVGGWITIWTDMSISAASLIRYGTATHTVNTDQRRIGLTLTNNGGNSYSFQVPSDSGVALPGYWMLFVMNSAGVPSVASTINVTQGQTGHHHHHH

SEQ ID NO: 209 - DNA, 1953 bp, Artificial Sequence
  Engineered variant of Galactose Oxidase from Fusarium graminearum
atggcatcagcaccgatcggggtagccatcccgcgcaacaactgggccgttacatgcgattccgcccagagtgggaatgaatgcattaaggcaattgacggtaataaagacacgttttggcacactcaatatggtgtgaacggagatcccaaaccgccgcacaccatcacgatcgatatgaaaacagtacaaaacgtgaatggcctttctgtactgccacgtcaggatggcaatcagaatggatggatcggacgtcacgaggtgtatttaagttctgatggggtgaattggggatcgcctgtagcgtctgggtcctggtttgccgattccaccacaaagtactctaattttgagacacgtccggcccgttacgtgcgccttgtcgccattaccgaagccaatgggcaaccgtggacttcaattgccgagattaacgtatttcaggcgtctagttacactgccccgcagccggggttggggcgctggggcccgacaatcgatcttcccattgtgccatcggccgccgcaatcgagccaacgagcggtcgtgtcttgatgtggagctcttatcgtaacgatgcgtttcgtgactctcctggcggtattacactgacgagctcatgggaccctagcactggaattgtatccgatcgcactagtaccgttaccgggcacgacatgttttgccccggtatctcgatggacgggaacggtcagatcgtggtcagcggtggtaatgatgcaaagaaaacttccttatatgattcgagctcggactcttggattccgggcccggatatgcaggtcgcgcgtgggtataactcaagtgcgactatgagtgatgggcgcgtatttacgattggcggcagttttagtggcggtgtagttgagaagaacggggaggtttacgagccgagctcgaagacttggacttcgctgccgaatgcaaaagttaaccccatgctgaccgccgataaacggggtctgtaccgtagcgataatcatgcttggctgtttgggtggaaaaagggtagcgtcttccaagcaggtccaagtactgccatgaactggtattatacatctgggtcgggggacgttaagagtgcagggaagcgtcaatcagaccgcggagtagccccagacgccatgtgcggtaatgccgtaatgtacgacgcagtcaaaggcaaaattttgactttcgggggctcgcccgattatgaggactcagatgcgactacaaatgcccatattatcacgctgggcgagcctggcacgagtccgaatacggtatttgcgagtaatgggttactgttcgctcgtacctttcatacctcggtggtccttccggacgggagtgtattcatcacaggaggccagcagcgcgcggttccactggaagatagcacacccgtatttactccagagatctacgttcccgaacaagatactttttacaagcaaaacccgaatagtatcgttcgtgcctatcattcgatcagcttgttgctgccggacggacgtgttttcaatggtggcggtggcttatgcggcgattgtgagacgaaccactttgatgcgcaaatctttacgccgaattatctttacgatagcaacgggaacttagccactcgccctaaaatcacccgtacctcaacccagtcagtcgtggtcggcgggtggatcaccatttggactgacatgtcgatctcggccgcaagtttaattcgctacggaactgctactcacacggtgaacaccgatcagcgacgcatcggcttgacgttaacgaacaacggaggtaattcgtacagctttcaagttccgtcggacagcggggttgctcttccgggatactggatgttgttcgttatgaattccgctggtgtaccctccgttgcgtcgacgattaacgttacccagggccaaactggccaccatcaccatcaccattag

SEQ ID NO: 210 - protein, 650 aa, Artificial Sequence
  Engineered variant of Galactose Oxidase from Fusarium graminearum
MASAPIGVAIPRNNWAVTCDSAQSGNECIKAIDGNKDTFWHTQYGVNGDPKPPHTITIDMKTVQNVNGLSVLPRQDGNQNGWIGRHEVYLSSDGVNWGSPVASGSWFADSTTKYSNFETRPARYVRLVAITEANGQPWTSIAEINVFQASSYTAPQPGLGRWGPTIDLPIVPSAAAIEPTSGRVLMWSSYRNDAFRDSPGGITLTSSWDPSTGIVSDRTSTVTGHDMFCPGISMDGNGQIVVSGGNDAKKTSLYDSSSDSWIPGPDMQVARGYNSSATMSDGRVFTIGGSFSGGVVEKNGEVYEPSSKTWTSLPNAKVNPMLTADKRGLYRSDNHAWLFGWKKGSVFQAGPSTAMNWYYTSGSGDVKSAGKRQSDRGVAPDAMCGNAVMYDAVKGKILTFGGSPDYEDSDATTNAHIITLGEPGTSPNTVFASNGLLFARTFHTSVVLPDGSVFITGGQQRAVPLEDSTPVFTPEIYVPEQDTFYKQNPNSIVRAYHSISLLLPDGRVFNGGGGLCGDCETNHFDAQIFTPNYLYDSNGNLATRPKITRTSTQSVVVGGWITIWTDMSISAASLIRYGTATHTVNTDQRRIGLTLTNNGGNSYSFQVPSDSGVALPGYWMLFVMNSAGVPSVASTINVTQGQTGHHHHHH

SEQ ID NO: 211 - DNA, 1953 bp, Artificial Sequence
  Engineered variant of Galactose Oxidase from Fusarium graminearum
atggcatcagcaccgatcggggtagccatcccgcgcaacaactgggccgttacatgcgattccgcccagagtgggaatgaatgcattaaggcaattgacggtaataaagacacgttttggcacactcaatatggtgtgaacggagatcccaaaccgccgcacaccatcacgatcgatatgaaaacagtacaaaacgtgaatggcctttctgtactgccacgtcaggatggcaatcagaatggatggatcggacgtcacgaggtgtatttaagttctgatggggtgaattggggatcgcctgtagcgtctgggtcctggtttgccgattccaccacaaagtactctaattttgagacacgtccggcccgttacgtgcgccttgtcgccattaccgaagccaatgggcaaccgtggacttcaattgccgagattaacgtatttcaggcgtctagttacactgccccgcagccgggcttggggcgctggggcccgacaatcgatcttcccattgtgccatcggccgccgcaatcgagccaacgagcggtcgtgtcttgatgtggagctcttatcgtaacgatgcgtttcgtgactctcctggcggtattacactgacgagctcatgggaccctagcactggaattgtatccgatcgcactagtaccgttaccgggcacgacatgttttgccccggtatctcgatggacgggaacggtcagatcgtggtcagcggtggtaatgatgcaaagaaaacttccttatatgattcgagctcggactcttggattccgggcccggatatgcaggtcgcgcgtgggtatcaatcaagtgcgactatgagtgatgggcgcgtatttacgattggcggcagttttagtggcggtcaagttgagaagaacggggaggtttactcgccgagctcgaagacttggacttcgctgccgaatgcaaaagttaaccccatgctgaccgccgataaacggggtctgtaccgtagcgataatcatgcttggctgtttgggtggaaaaagggtagcgtcttccaagcaggtccaagtactgccatgaactggtattatacatctgggtcgggggacgttctgagtgcagggaagcgtcaatcagaccgcggagtagccccagacgccatgtgcggtaatgccgtaatgtacgacgcagtcaaaggcaaaattttgactttcgggggctcgcccgattatgaggactcagatgcgactacaaatgcccatattatcacgctgggcgagcctggcacgagtccgaatacggtatttgcgagtaatgggttactgttcgctcgtacctttcatacctcggtggtccttccggacgggagtgtattcatcacaggaggccagcagcgcgcggttccactggaagatagcacacccgtatttactccagagatctacgttcccgaacaagatactttttacaagcaaaacccgaatagtatcgttcgtgcctatcattcgatcagcttgttgctgccggacggacgtgttttcaatggtggcggtggcttatgcggcgattgtgagacgaaccactttgatgcgcaaatctttacgccgaattatctttacgatagcaacgggaacttagccactcgccctaaaatcacccgtacctcaacccagtcagtcaaggtcggcgggtggatcaccatttggactgacatgtcgatctcggccgcaagtttaattcgctacggaactgctactcacacggtgaacaccgatcagcgacgcatcggcttgacgttaacgaacaacggaggtaattcgtacagctttcaagttccgtcggacagcggggttgctcttccgggatactggatgttgttcgttatgaattccgctggtgtaccctccgttgcgtcgacgattaacgttacccagggccaaactggccaccatcaccatcaccattag

SEQ ID NO: 212 - protein, 650 aa, Artificial Sequence
  Engineered variant of Galactose Oxidase from Fusarium graminearum
MASAPIGVAIPRNNWAVTCDSAQSGNECIKAIDGNKDTFWHTQYGVNGDPKPPHTITIDMKTVQNVNGLSVLPRQDGNQNGWIGRHEVYLSSDGVNWGSPVASGSWFADSTTKYSNFETRPARYVRLVAITEANGQPWTSIAEINVFQASSYTAPQPGLGRWGPTIDLPIVPSAAAIEPTSGRVLMWSSYRNDAFRDSPGGITLTSSWDPSTGIVSDRTSTVTGHDMFCPGISMDGNGQIVVSGGNDAKKTSLYDSSSDSWIPGPDMQVARGYQSSATMSDGRVFTIGGSFSGGQVEKNGEVYSPSSKTWTSLPNAKVNPMLTADKRGLYRSDNHAWLFGWKKGSVFQAGPSTAMNWYYTSGSGDVLSAGKRQSDRGVAPDAMCGNAVMYDAVKGKILTFGGSPDYEDSDATTNAHIITLGEPGTSPNTVFASNGLLFARTFHTSVVLPDGSVFITGGQQRAVPLEDSTPVFTPEIYVPEQDTFYKQNPNSIVRAYHSISLLLPDGRVFNGGGGLCGDCETNHFDAQIFTPNYLYDSNGNLATRPKITRTSTQSVKVGGWITIWTDMSISAASLIRYGTATHTVNTDQRRIGLTLTNNGGNSYSFQVPSDSGVALPGYWMLFVMNSAGVPSVASTINVTQGQTGHHHHHH

SEQ ID NO: 213 - DNA, 1953 bp, Artificial Sequence
  Engineered variant of Galactose Oxidase from Fusarium graminearum
atggcatcagcaccgatcggggtagccatcccgcgcaacaactgggccgttacatgcgattccgcccagagtgggaatgaatgcattaaggcaattgacggtaataaagacacgttttggcacactcaatatggtgtaaacggagatcccaaaccgccgcacaccatcacgatcgatatgaaaacagtacaaaacgtgaatggcctttctgtactgccacgtcaggatggcaatcagaatggatggatcggacgtcacgaggtgtatttaagttctgatggggtgaattggggatcgcctgtagcgtctgggtcctggtttgccgattccaccacaaagtactctaattttgagacacgtccggcccgttacgtgcgccttgtcgccattaccgaagccaatgggcaaccgtggacttcaattgccgagattaacgtatttcaggcgtctagttacactgccccgcagccgggcttggggcgctggggcccgacaatcgatcttcccattgtgccatcggccgccgcaatcgagccaacgagcggtcgtgtcttgatgtggagctcttatcgtcaggatgcgtttcgtgactctcctggcggtattacactgacgagctcatgggaccctagcactggaattgtatccgatcgcactagtaccgttaccgggcacgacatgttttgccccggtatctcgatggacgggaacggtcagatcgtggtcagcggtggtaatgatgcaaagaaaacttccttatatgattcgagctcggactcttggattccgggcccggatatgcaggtcgcgcgtgggtataactcaagtgcgactatgagtgatgggcgcgtatttacgattggcggcagttttagtggcggtcaagttgagaagaacggggaggtttactccccgagctcgaagacttggacgtcgctgccgaatgcaaaagttaaccccatgctgaccgccgataaacggggtctgtaccgtagcgataatcatgcttggctgtttgggtggaaaaagggtagcgtcttccaagcaggtccaagtaccgccatgaactggtattatacatctgggtcgggggacgttaagagtgcagggaagcgtcaatcagaccgcggagtagccccagacgccatgtgcggtaatgccgtaatgtacgacgcagtcaaaggcaaaattttgactttcgggggctcgcccgattatgaggactcagatgcgactacaaatgcccatattatcacgctgggcgagcctggcacgagtccgaatacggtatttgcgagtaatgggttactgttcgctcgtacctttcatacctcggtggtccttccggacgggagtgtattcatcacaggaggccagcagcgcgcggttccactggaagatagcacacccgtatttactccagagatctacgttcccgaacaagatactttttacaagcaaaacccgaatagtatcgttcgtgcctatcattcgatcagcttgttgctgccggacggacgtgttttcaatggtggcggtggcttatgcggcgattgtgagacgaaccactttgatgcgcaaatctttacgccgaattatctttacgatagcaacgggaacttagccactcgccctaaaatcacccgtctgtcaacccagtcagtcgtggtcggcgggtggatcaccatttggactgacatgtcgatctcggccgcaagtttaattcgctacggaactgctactcacacggtgaacaccgatcagcgacgcatcggcttgacgttaacgaacaacggaggtaattcgtacagctttcaagttccgtcggacagcggggttgctcttccgggatactggatgttgttcgttatgaattccgctggtgtaccctccgttgcgtcgacgattaacgttacccagggccaaactggccaccatcaccatcaccattag

SEQ ID NO: 214 - protein, 650 aa, Artificial Sequence
  Engineered variant of Galactose Oxidase from Fusarium graminearum
MASAPIGVAIPRNNWAVTCDSAQSGNECIKAIDGNKDTFWHTQYGVNGDPKPPHTITIDMKTVQNVNGLSVLPRQDGNQNGWIGRHEVYLSSDGVNWGSPVASGSWFADSTTKYSNFETRPARYVRLVAITEANGQPWTSIAEINVFQASSYTAPQPGLGRWGPTIDLPIVPSAAAIEPTSGRVLMWSSYRQDAFRDSPGGITLTSSWDPSTGIVSDRTSTVTGHDMFCPGISMDGNGQIVVSGGNDAKKTSLYDSSSDSWIPGPDMQVARGYNSSATMSDGRVFTIGGSFSGGQVEKNGEVYSPSSKTWTSLPNAKVNPMLTADKRGLYRSDNHAWLFGWKKGSVFQAGPSTAMNWYYTSGSGDVKSAGKRQSDRGVAPDAMCGNAVMYDAVKGKILTFGGSPDYEDSDATTNAHIITLGEPGTSPNTVFASNGLLFARTFHTSVVLPDGSVFITGGQQRAVPLEDSTPVFTPEIYVPEQDTFYKQNPNSIVRAYHSISLLLPDGRVFNGGGGLCGDCETNHFDAQIFTPNYLYDSNGNLATRPKITRLSTQSVVVGGWITIWTDMSISAASLIRYGTATHTVNTDQRRIGLTLTNNGGNSYSFQVPSDSGVALPGYWMLFVMNSAGVPSVASTINVTQGQTGHHHHHH

SEQ ID NO: 215 - DNA, 1953 bp, Artificial Sequence
  Engineered variant of Galactose Oxidase from Fusarium graminearum
atggcatcagcaccgatcggggtagccatcccgcgcaacaactgggccgttacatgcgattccgcccagagtgggaatgaatgcattaaggcaattgacggtaataaagacacgttttggcacactcaatatggtgctaacggagatcccaaaccgccgcacaccatcacgatcgatatgaaaacagtacaaaacgtgaatggcctttctgtactgccacgtcaggatggcaatcagaatggatggatcggacgtcacgaggtgtatttaagttctgatggggtgaattggggatcgcctgtagcgtctgggtcctggtttgccgattccaccacaaagtactctaattttgagacacgtccggcccgttacgtgcgccttgtcgccattaccgaagccaatgggcaaccgtggacttcaattgccgagattaacgtatttcaggcgtctagttacactgccccgcagccgggcttggggcgctggggcccgacaatcgatcttcccattgtgccatcggccgccgcaatcgagccaacgagcggtcgtgtcttgatgtggagctcttatcgtcaagatgcgtttcgtgactctcctggcggtattacactgacgagctcatgggaccctagcactggaattgtatccgatcgcactagtaccgttaccgggcacgacatgttttgccccggtatctcgatggacgggaacggtcagatcgtggtcagcggtggtaatgatgcaaagaaaacttccttatatgattcgagctcggactcttggattccgggcccggatatgcaggtcgcgcgtgggtataactcaagtgcgactatgagtgatgggcgcgtatttacgattggcggcagttttagtggcggtcaagttctgaagaacggggaggtttacgagccgagctcgaagacttggacttcgctgccgaatgcaaaagttaaccccatgctgaccgccgataaacggggtctgtaccgtagcgataatcatgcttggctgtttgggtggaaaaagggtagcgtcttccaagcaggtccaagtactgccatgaactggtattatacatctgggtcgggggacgttctgagtgcagggaagcgtcaatcagaccgcggagtagccccagacgccatgtgcggtaatgccgtaatgtacgacgcagtcaaaggcaaaattttgactttcgggggctcgcccgattatgaggactcagatgcgactacaaatgcccatattatcacgctgggcgagcctggcacgagtccgaatacggtatttgcgagtaatgggttaaatttcgctcgtacctttcatacctcggtggtccttccggacgggagtgtattcatcacaggaggccagcagcgcgcggttccactggaagatagcacacccgtatttactccagagatctacgttcccgaacaagatactttttacaagcaaaacccgaatagtatcgttcgtgcctatcattcgatcagcttgttgctgccggacggacgtgttttcaatggtggcggtggcttatgcggcgattgtgagacgaaccactttgatgcgcaaatctttacgccgaattatctttacgatagcaacgggaacttagccactcgccctaaaatcacccgtacctcaacccagtcagtcgtggtcggcgggtggatcaccatttggactgacatgtcgatctcggccgcaagtttaattcgctacggaactgctactcacacggtgaacaccgatcagcgacgcatcggcttgacgttaacgaacaacggaggtaattcgtacagctttcaagttccgtcggacagcggggttgctcttccgggatactggatgttgttcgttatgaattccgctggtgtaccctccgttgcgtcgacgattcgtgttacccagggccaaactggccaccatcaccatcaccattag

SEQ ID NO: 216 - protein, 650 aa, Artificial Sequence
  Engineered variant of Galactose Oxidase from Fusarium graminearum
MASAPIGVAIPRNNWAVTCDSAQSGNECIKAIDGNKDTFWHTQYGANGDPKPPHTITIDMKTVQNVNGLSVLPRQDGNQNGWIGRHEVYLSSDGVNWGSPVASGSWFADSTTKYSNFETRPARYVRLVAITEANGQPWTSIAEINVFQASSYTAPQPGLGRWGPTIDLPIVPSAAAIEPTSGRVLMWSSYRQDAFRDSPGGITLTSSWDPSTGIVSDRTSTVTGHDMFCPGISMDGNGQIVVSGGNDAKKTSLYDSSSDSWIPGPDMQVARGYNSSATMSDGRVFTIGGSFSGGQVLKNGEVYEPSSKTWTSLPNAKVNPMLTADKRGLYRSDNHAWLFGWKKGSVFQAGPSTAMNWYYTSGSGDVLSAGKRQSDRGVAPDAMCGNAVMYDAVKGKILTFGGSPDYEDSDATTNAHIITLGEPGTSPNTVFASNGLNFARTFHTSVVLPDGSVFITGGQQRAVPLEDSTPVFTPEIYVPEQDTFYKQNPNSIVRAYHSISLLLPDGRVFNGGGGLCGDCETNHFDAQIFTPNYLYDSNGNLATRPKITRTSTQSVVVGGWITIWTDMSISAASLIRYGTATHTVNTDQRRIGLTLTNNGGNSYSFQVPSDSGVALPGYWMLFVMNSAGVPSVASTIRVTQGQTGHHHHHH

SEQ ID NO: 217 - DNA, 1953 bp, Artificial Sequence
  Engineered variant of Galactose Oxidase from Fusarium graminearum
atggcatcagcaccgatcggggtagccatcccgcgcaacaactgggccgttacatgcgattccgcccagagtgggaatgaatgcattaaggcaattgacggtaataaagacacgttttggcacactcaatatggtgtgaacggagatcccaaaccgccgcacaccatcacgatcgatatgaaaacagtacaaaacgtgaatggcctttctgtactgccacgtcaggatggcaatcagaatggatggatcggacgtcacgaggtgtatttaagttctgatggggtgaattggggatcgcctgtagcgtctgggtcctggtttgccgattccaccacaaagtactctaattttgagacacgtccggcccgttacgtgcgccttgtcgccattaccgaagccaatgggcaaccgtggacttcaattgccgagattaacgtatttcaggcgtctagttacactgccccgcagccgggcttggggcgctggggcccgacaatcgatcttcccattgtgccatcggccgccgcaatcgagccaacgagcggtcgtgtcttgatgtggagctcttatcgtaacgatgcgtttcgtgactctcctggcggtattacactgacgagctcatgggaccctagcactggaattgtatccgatcgcactagtaccgttaccgggcacgacatgttttgccccggtatctcgatggacgggaacggtcagatcgtggtcagcggtggtaatgatgcaaagaaaacttccttatatgattcgagctcggactcttggattccgggcccggatatgcaggtcgcgcgtgggtatcaatcaagtgcgactatgagtgatgggcgcgtatttacgattggcggcagttttagtggcggtcaagttgagaagaacggggaggtttacgagccgagctcgaagacttggacttcgctgccgaatgcaaaagttaaccccatgctgaccgccgataaacggggtctgtaccgtagcgataatcatgcttggctgtttgggtggaaaaagggtagcgtcttccaagcaggtccaagtactgccatgaactggtattatacatctgggtcgggggacgttaagagtgcagggaagcgtcaatcagaccgcggagtagccccagacgccatgtgcggtaatgccgtaatgtacgacgcagtcaaaggcaaaattttgactttcgggggctcgcccgattatgaggactcagatgcgactacaaatgcccatattatcacgctgggcgagcctggcacgctgccgaatacggtatttgcgagtaatgggttactgttcgctcgtacctttcatacctcggtggtccttccggacgggagtgtattcatcacaggaggccagcagcgcgcggttccactggaagatagcacacccgtatttactccagagatctacgttcccgaacaagatactttttacaagcaaaacccgaatagtatcgttcgtgcctatcattcgatcagcttgttgctgccggacggacgtgttttcaatggtggcggtggcttatgcggcgattgtgagacgaaccactttgatgcgcaaatctttacgccgaattatctttacgatagcaacgggaacttagccactcgccctaaaatcacccgtacctcaacccagtcagtcgtggtcggcgggtggatcaccatttggactgacatgtcgatctcggccgcaagtttaattcgctacggaactgctactcacacggtgaacaccgatcagcgacgcatcggcttgacgttaacgaacaacggaggtaattcgtacagctttcaagttccgtcggacagcggggttgctcttccgggatactggatgttgttcgttatgaattccgctggtgtaccctccgttgcgtcgacgattaatgttacccagggccaaactggccaccatcaccatcaccattag

SEQ ID NO: 218 - protein, 650 aa, Artificial Sequence
  Engineered variant of Galactose Oxidase from Fusarium graminearum
MASAPIGVAIPRNNWAVTCDSAQSGNECIKAIDGNKDTFWHTQYGVNGDPKPPHTITIDMKTVQNVNGLSVLPRQDGNQNGWIGRHEVYLSSDGVNWGSPVASGSWFADSTTKYSNFETRPARYVRLVAITEANGQPWTSIAEINVFQASSYTAPQPGLGRWGPTIDLPIVPSAAAIEPTSGRVLMWSSYRNDAFRDSPGGITLTSSWDPSTGIVSDRTSTVTGHDMFCPGISMDGNGQIVVSGGNDAKKTSLYDSSSDSWIPGPDMQVARGYQSSATMSDGRVFTIGGSFSGGQVEKNGEVYEPSSKTWTSLPNAKVNPMLTADKRGLYRSDNHAWLFGWKKGSVFQAGPSTAMNWYYTSGSGDVKSAGKRQSDRGVAPDAMCGNAVMYDAVKGKILTFGGSPDYEDSDATTNAHIITLGEPGTLPNTVFASNGLLFARTFHTSVVLPDGSVFITGGQQRAVPLEDSTPVFTPEIYVPEQDTFYKQNPNSIVRAYHSISLLLPDGRVFNGGGGLCGDCETNHFDAQIFTPNYLYDSNGNLATRPKITRTSTQSVVVGGWITIWTDMSISAASLIRYGTATHTVNTDQRRIGLTLTNNGGNSYSFQVPSDSGVALPGYWMLFVMNSAGVPSVASTINVTQGQTGHHHHHH

SEQ ID NO: 219 - DNA, 1953 bp, Artificial Sequence
  Engineered variant of Galactose Oxidase from Fusarium graminearum
atggcatcagcaccgatcggggtagccatcccgcgcaacaactgggccgttacatgcgattccgcccagagtgggaatgaatgcattaaggcaattgacggtaataaagacacgttttggcacactcaatatggtgtaaacggagatcccaaaccgccgcacaccatcacgatcgatatgaaaacagtacaaaacgtgaatggcctttctgtactgccacgtcaggatggcaatcagaatggatggatcggacgtcacgaggtgtatttaagttctgatggggtgaattggggatcgcctgtagcgtctgggtcctggtttgccgattccaccacaaagtactctaattttgagacacgtccggcccgttacgtgcgccttgtcgccattaccgaagccaatgggcaaccgtggacttcaattgccgagattaacgtatttcaggcgtctagttacactgccccgcagccgggcttggggcgctggggcccgacaatcgatcttcccattgtgccatcggccgccgcaatcgagccaacgagcggtcgtgtcttgatgtggagctcttatcgtcaggatgcgtttcgtgactctcctggcggtattacactgacgagctcatgggaccctagcactggaattgtatccgatcgcactagtaccgttaccgggcacgacatgttttgccccggtatctcgatggacgggaacggtcagatcgtggtcagcggtggtaatgatgcaaagaaaacttccttatatgattcgagctcggactcttggattccgggcccggatatgcaggtcgcgcgtgggtataactcaagtgcgactatgagtgatgggcgcgtatttacgattggcggcagttttagtggcggtcaagttgagaagaacggggaggtttactccccgagctcgaagacttggacttcgctgccgaatgcaaaagttaaccccatgctgaccgccgataaacggggtctgtaccgtagcgataatcatgcttggctgtttgggtggaaaaagggtagcgtcttccaagcaggtccaagtactgccatgaactggtattatacatctgggtcgggggacgttaagagtgcagggaagcgtcaatcagaccgcggagtagccccagacgccatgtgcggtaatgccgtaatgtacgacgcagtcaaaggcaaaattttgactttcgggggctcgcccgattatgaggactcagatgcgactacaaatgcccatattatcacgctgggcgagcctggcacgagtccgaatacggtatttgcgagtaatgggttatatttcgctcgtacctttcatacctcggtggtccttccggacgggagtgtattcatcacaggaggccagcagcgcgcggttccactggaagatagcacacccgtatttactccagagatctacgttcccgaacaagatactttttacaagcaaaacccgaatagtatcgttcgtgcctatcattcgatcagcttgttgctgccggacggacgtgttttcaatggtggcggtggcttatgcggcgattgtgagacgaaccactttgatgcgcaaatctttacgccgaattatctttacgatagcaacgggaacttagccactcgccctaaaatcacccgtacctcaacccagtcagtcgtggtcggcgggtggatcaccatttggactgacatgtcgatctcggccgcaagtttaattcgctacggaactgctactcacacggtgaacaccgatcagcgacgcatcggcttgacgttaacgaacaacggaggtaattcgtacagctttcaagttccgtcggacagcggggttgctcttccgggatactggatgttgttcgttatgaattccgctggtgtaccctccgttgcgtcgacgattaacgttacccagggccaaactggccaccatcaccatcaccattag

SEQ ID NO: 220 - protein, 650 aa, Artificial Sequence
  Engineered variant of Galactose Oxidase from Fusarium graminearum
MASAPIGVAIPRNNWAVTCDSAQSGNECIKAIDGNKDTFWHTQYGVNGDPKPPHTITIDMKTVQNVNGLSVLPRQDGNQNGWIGRHEVYLSSDGVNWGSPVASGSWFADSTTKYSNFETRPARYVRLVAITEANGQPWTSIAEINVFQASSYTAPQPGLGRWGPTIDLPIVPSAAAIEPTSGRVLMWSSYRQDAFRDSPGGITLTSSWDPSTGIVSDRTSTVTGHDMFCPGISMDGNGQIVVSGGNDAKKTSLYDSSSDSWIPGPDMQVARGYNSSATMSDGRVFTIGGSFSGGQVEKNGEVYSPSSKTWTSLPNAKVNPMLTADKRGLYRSDNHAWLFGWKKGSVFQAGPSTAMNWYYTSGSGDVKSAGKRQSDRGVAPDAMCGNAVMYDAVKGKILTFGGSPDYEDSDATTNAHIITLGEPGTSPNTVFASNGLYFARTFHTSVVLPDGSVFITGGQQRAVPLEDSTPVFTPEIYVPEQDTFYKQNPNSIVRAYHSISLLLPDGRVFNGGGGLCGDCETNHFDAQIFTPNYLYDSNGNLATRPKITRTSTQSVVVGGWITIWTDMSISAASLIRYGTATHTVNTDQRRIGLTLTNNGGNSYSFQVPSDSGVALPGYWMLFVMNSAGVPSVASTINVTQGQTGHHHHHH

SEQ ID NO: 221 - DNA, 1953 bp, Artificial Sequence
  Engineered variant of Galactose Oxidase from Fusarium graminearum
atggcatcagcaccgatcggggtagccatcccgcgcaacaactgggccgttacatgcgattccgcccagagtgggaatgaatgcattaaggcaattgacggtaataaagacacgttttggcacactcaatatggtactaacggagatcccaaaccgccgcacaccatcacgatcgatatgaaaacagtacaaaacgtgaatggcctttctgtactgccacgtcaggatggcaatcagaatggatggatcggacgtcacgaggtgtatttaagttctgatggggtgaattggggatcgcctgtagcgtctgggtcctggtttgccgattccaccacaaagtactctaattttgagacacgtccggcccgttacgtgcgccttgtcgccattaccgaagccaatgggcaaccgtggacttcaattgccgagattaacgtatttcaggcgtctagttacactgccccgcagccgggcttggggcgctggggcccgacaatcgatcttcccattgtgccatcggccgccgcaatcgagccaacgagcggtcgtgtcttgatgtggagctcttatcgtaacgatgcgtttcgtgactctcctggcggtattacactgacgagctcatgggaccctagcactggaattgtatccgatcgcactagtaccgttaccgggcacgacatgttttgccccggtatctcgatggacgggaacggtcagatcgtggtcagcggtggtaatgatgcaaagaaaacttccttatatgattcgagctcggactcttggattccgggcccggatatgcaggtcgcgcgtgggtatcaatcaagtgcgactatgagtgatgggcgcgtatttacgattggcggcagttttagtggcggtcaagttgagaagaacggggaggtttactccccgagctcgaagacttggacttcgctgccgaatgcaaaagttaaccccatgctgaccgccgataaacggggtctgtaccgtagcgataatcatgcttggctgtttgggtggaaaaagggtagcgtcttccaagcaggtccaagtactgccatgaactggtattatacatctgggtcgggggacgttaagagtgcagggaagcgtcaatcagaccgcggagtagccccagacgccatgtgcggtaatgccgtaatgtacgacgcagtcaaaggcaaaattttgactttcgggggctcgcccgattatgaggattcagatgcgactacaaatgcccatattatcacgctgggcgagcctggcacgagtccgaatacggtatttgcgagtaatgggttatatttcgctcgtacctttcatacctcggtggtccttccggacgggagtgtattcatcacaggaggccagcagcgcgcggttccactggaagatagcacacccgtatttactccagagatctacgttcccgaacaagatactttttacaagcaaaacccgaatagtatcgttcgtgcctatcattcgatcagcttgttgctgccggacggacgtgttttcaatggtggcggtggcttatgcggcgattgtgagacgaaccactttgatgcgcaaatctttacgccgaattatctttacgatagcaacgggaacttagccactcgccctaaaatcacccgtacctcaacccagtcagtcaaggtcggcgggtggatcaccatttggactgacatgtcgatctcggccgcaagtttaattcgctacggaactgctactcacacggtgaacaccgatcagcgacgcatcggcttgacgttaacgaacaacggaggtaattcgtacagctttcaagttccgtcggacagcggggttgctcttccgggatactggatgttgttcgttatgaattccgctggtgtaccctccgttgcgtcgacgattaacgttacccagggccaaactggccaccatcaccatcaccattag

SEQ ID NO: 222 - protein, 650 aa, Artificial Sequence
  Engineered variant of Galactose Oxidase from Fusarium graminearum
MASAPIGVAIPRNNWAVTCDSAQSGNECIKAIDGNKDTFWHTQYGTNGDPKPPHTITIDMKTVQNVNGLSVLPRQDGNQNGWIGRHEVYLSSDGVNWGSPVASGSWFADSTTKYSNFETRPARYVRLVAITEANGQPWTSIAEINVFQASSYTAPQPGLGRWGPTIDLPIVPSAAAIEPTSGRVLMWSSYRNDAFRDSPGGITLTSSWDPSTGIVSDRTSTVTGHDMFCPGISMDGNGQIVVSGGNDAKKTSLYDSSSDSWIPGPDMQVARGYQSSATMSDGRVFTIGGSFSGGQVEKNGEVYSPSSKTWTSLPNAKVNPMLTADKRGLYRSDNHAWLFGWKKGSVFQAGPSTAMNWYYTSGSGDVKSAGKRQSDRGVAPDAMCGNAVMYDAVKGKILTFGGSPDYEDSDATTNAHIITLGEPGTSPNTVFASNGLYFARTFHTSVVLPDGSVFITGGQQRAVPLEDSTPVFTPEIYVPEQDTFYKQNPNSIVRAYHSISLLLPDGRVFNGGGGLCGDCETNHFDAQIFTPNYLYDSNGNLATRPKITRTSTQSVKVGGWITIWTDMSISAASLIRYGTATHTVNTDQRRIGLTLTNNGGNSYSFQVPSDSGVALPGYWMLFVMNSAGVPSVASTINVTQGQTGHHHHHH

SEQ ID NO: 223 - DNA, 1953 bp, Artificial Sequence
  Engineered variant of Galactose Oxidase from Fusarium graminearum
atggcatcagcaccgatcggggtagccatcccgcgcaacaactgggccgttacatgcgattccgcccagagtgggaatgaatgcattaaggcaattgacggtaataaagacacgttttggcacactcaatatggtgtaaacggagatcccaaaccgccgcacaccatcacgatcgatatgaaaacagtacaaaacgtgaatggcctttctgtactgccacgtcaggatggcaatcagaatggatggatcggacgtcacgaggtgtatttaagttctgatggggtgaattggggatcgcctgtagcgtctgggtcctggtttgccgattccaccacaaagtactctaattttgagacacgtccggcccgttacgtgcgccttgtcgccattaccgaagccaatgggcaaccgtggacttcaattgccgagattaacgtatttcaggcgtctagttacactgccccgcagccgggcttggggcgctggggcccgacaatcgatcttcccattgtgccatcggccgccgcaatcgagccaacgagcggtcgtgtcttgatgtggagctcttatcgtaacgatgcgtttcgtgactctcctggcggtattacactgacgagctcatgggaccctagcactggaattgtatccgatcgcactagtaccgttaccgggcacgacatgttttgccccggtatctcgatggacgggaacggtcagatcgtggtcagcggtggtaatgatgcaaagaaaacttccttatatgattcgagctcggactcttggattccgggcccggatatgcaggtcgcgcgtgggtatcaatcaagtgcgactatgagtgatgggcgcgtatttacgattggcggcagttttagtggcggtcaagttgagaagaacggggaggtttactccccgagctcgaagacttggacttcgctgccgaatgcaaaagttaaccccatgctgaccgccgataaacggggtctgtaccgtagcgataatcatgcttggctgtttgggtggaaaaagggtagcgtcttccaagcaggtccaagtactgccatgaactggtattatacatctgggtcgggggacgttaagagtgcagggaagcgtcaatcagaccgcggagtagccccagacgccatgtgcggtaatgccgtaatgtacgacgcagtcaaaggcaaaattttgactttcgggggctcgcccgattatgaggactcagatgcgactacaaatgcccatattatcacgctgggcgagcctggcacgagtccgaatacggtatttgcgagtaatgggttactgttcgctcgtacctttcatacctcggtggtccttccggacgggagtgtattcatcacaggaggccagcagcgcgcggttccactggaagatagcacacccgtatttactccagagatctacgttcccgaacaagatactttttacaagcaaaacccgaatagtatcgttcgtgcctatcattcgatcagcttgttgctgccggacggacgtgttttcaatggtggcggtggcttatgcggcgattgtgagacgaaccactttgatgcgcaaatctttacgccgaattatctttacgatagcaacgggaacttagccactcgccctaaaatcacccgtacctcaacccagtcagtcgtcgtcggcgggtggatcaccatttggactgacatgtcgatctcggccgcaagtttaattcgctacggaactgctactcacacggtgaacaccgatcagcgacgcatcggcttgacgttaacgaacaacggaggtaattcgtacagctttcaagttccgtcggacagcggggttgctcttccgggatactggatgttgttcgttatgaattccgctggtgtaccctccgttgcgtcgacgattaacgttacccagggccaaactggccaccatcaccatcaccattag

SEQ ID NO: 224 - protein, 650 aa, Artificial Sequence
  Engineered variant of Galactose Oxidase from Fusarium graminearum
MASAPIGVAIPRNNWAVTCDSAQSGNECIKAIDGNKDTFWHTQYGVNGDPKPPHTITIDMKTVQNVNGLSVLPRQDGNQNGWIGRHEVYLSSDGVNWGSPVASGSWFADSTTKYSNFETRPARYVRLVAITEANGQPWTSIAEINVFQASSYTAPQPGLGRWGPTIDLPIVPSAAAIEPTSGRVLMWSSYRNDAFRDSPGGITLTSSWDPSTGIVSDRTSTVTGHDMFCPGISMDGNGQIVVSGGNDAKKTSLYDSSSDSWIPGPDMQVARGYQSSATMSDGRVFTIGGSFSGGQVEKNGEVYSPSSKTWTSLPNAKVNPMLTADKRGLYRSDNHAWLFGWKKGSVFQAGPSTAMNWYYTSGSGDVKSAGKRQSDRGVAPDAMCGNAVMYDAVKGKILTFGGSPDYEDSDATTNAHIITLGEPGTSPNTVFASNGLLFARTFHTSVVLPDGSVFITGGQQRAVPLEDSTPVFTPEIYVPEQDTFYKQNPNSIVRAYHSISLLLPDGRVFNGGGGLCGDCETNHFDAQIFTPNYLYDSNGNLATRPKITRTSTQSVVVGGWITIWTDMSISAASLIRYGTATHTVNTDQRRIGLTLTNNGGNSYSFQVPSDSGVALPGYWMLFVMNSAGVPSVASTINVTQGQTGHHHHHH

SEQ ID NO: 225 - DNA, 1953 bp, Artificial Sequence
  Engineered variant of Galactose Oxidase from Fusarium graminearum
atggcatcagcaccgatcggggtagccatcccgcgcaacaactgggccgttacatgcgattccgcccagagtgggaatgaatgcattaaggcaattgacggtaataaagacacgttttggcacactcaatatggtgtgaacggagatcccaaaccgccgcacaccatcacgatcgatatgaaaacagtacaaaacgtgaatggcctttctgtactgccacgtcaggatggcaatcagaatggatggatcggacgtcacgaggtgtatttaagttctgatggggtgaattggggatcgcctgtagcgtctgggtcctggtttgccgattccaccacaaagtactctaattttgagacacgtccggcccgttacgtgcgccttgtcgccattaccgaagccaatgggcaaccgtggacttcaattgccgagattaacgtatttcaggcgtctagttacactgccccgcagccggagttggggcgctggggcccgacaatcgatcttcccattgtgccatcggccgccgcaatcgagccaacgagcggtcgtgtcttgatgtggagctcttatcgtaacgatgcgtttcgtgactctcctggcggtattacactgacgagctcatgggaccctagcactggaattgtatccgatcgcactagtaccgttaccgggcacgacatgttttgccccggtatctcgatggacgggaacggtcagatcgtggtcagcggtggtaatgatgcaaagaaaacttccttatatgattcgagctcggactcttggattccgggcccggatatgcaggtcgcgcgtgggtatcaatcaagtgcgactatgagtgatgggcgcgtatttacgattggcggcagttttagtggcggtcaagctgagaagaacggggaggtttactccccgagctcgaagacttggacttcgctgccgaatgcaaaagttaaccccatgctgaccgccgataaacggggtctgtaccgtagcgataatcatgcttggctgtttgggtggaaaaagggtagcgtcttccaagcaggtccaagtactgccatgaactggtattatacatctgggtcgggggacgttaagagtgcagggaagcgtcaatcagaccgcggagtagccccagacgccatgtgcggtaatgccgtaatgtacgacgcagtcaaaggcaaaattttgactttcgggggctcgcccgattatgaggactcagatgcgactacaaatgcccatattatcacgctgggcgagcctggcacgagtccgaatacggtatttgcgagtaatgggttaaatttcgctcgtacctttcatacctcggtggtccttccggacgggagtgtattcatcacaggaggccagcagcgcgcggttccactggaagatagcacacccgtatttactccagagatctacgttcccgaacaagatactttttacaagcaaaacccgaatagtatcgttcgtgcctatcattcgatcagcttgttgctgccggacggacgtgttttcaatggtggcggtggcttatgcggcgattgtgagacgaaccactttgatgcgcaaatctttacgccgaattatctttacgatagcaacgggaacttagccactcgccctaaaatcacccgtacctcaacccagtcagtcaaggtcggcgggtggatcaccatttggactgacatgtcgatctcggccgcaagtttaattcgctacggaactgctactcacacggtgaacaccgatcagcgacgcatcggcttgacgttaacgaacaacggaggtaattcgtacagctttcaagttccgtcggacagcggggttgctcttccgggatactggatgttgttcgttatgaattccgctggtgtaccctccgttgcgtcgacgattaatgttacccagggccaaactggccaccatcaccatcaccattag

SEQ ID NO: 226 - protein, 650 aa, Artificial Sequence
  Engineered variant of Galactose Oxidase from Fusarium graminearum
MASAPIGVAIPRNNWAVTCDSAQSGNECIKAIDGNKDTFWHTQYGVNGDPKPPHTITIDMKTVQNVNGLSVLPRQDGNQNGWIGRHEVYLSSDGVNWGSPVASGSWFADSTTKYSNFETRPARYVRLVAITEANGQPWTSIAEINVFQASSYTAPQPELGRWGPTIDLPIVPSAAAIEPTSGRVLMWSSYRNDAFRDSPGGITLTSSWDPSTGIVSDRTSTVTGHDMFCPGISMDGNGQIVVSGGNDAKKTSLYDSSSDSWIPGPDMQVARGYQSSATMSDGRVFTIGGSFSGGQAEKNGEVYSPSSKTWTSLPNAKVNPMLTADKRGLYRSDNHAWLFGWKKGSVFQAGPSTAMNWYYTSGSGDVKSAGKRQSDRGVAPDAMCGNAVMYDAVKGKILTFGGSPDYEDSDATTNAHIITLGEPGTSPNTVFASNGLNFARTFHTSVVLPDGSVFITGGQQRAVPLEDSTPVFTPEIYVPEQDTFYKQNPNSIVRAYHSISLLLPDGRVFNGGGGLCGDCETNHFDAQIFTPNYLYDSNGNLATRPKITRTSTQSVKVGGWITIWTDMSISAASLIRYGTATHTVNTDQRRIGLTLTNNGGNSYSFQVPSDSGVALPGYWMLFVMNSAGVPSVASTINVTQGQTGHHHHHH

SEQ ID NO: 227 - DNA, 1953 bp, Artificial Sequence
  Engineered variant of Galactose Oxidase from Fusarium graminearum
atggcatcagcaccgatcggggtagccatcccgcgcaacaactgggccgttacatgcgattccgcccagagtgggaatgaatgcattaaggcaattgacggtaataaagacacgttttggcacactcaatatggtgtgaacggagatcccaaaccgccgcacaccatcacgatcgatatgaaaacagtacaaaacgtgaatggcctttctgtactgccacgtcaggatggcaatcagaatggatggatcggacgtcacgaggtgtatttaagttctgatggggtgaattggggatcgcctgtagcgtctgggtcctggtttgccgattccaccacaaagtactctaattttgagacacgtccggcccgttacgtgcgccttgtcgccattaccgaagccaatgggcaaccgtggacttcaattgccgagattaacgtatttcaggcgtctagttacactgccccgcagccggagttggggcgctggggcccgacaatcgatcttcccattgtgccatcggccgccgcaatcgagccaacgagcggtcgtgtcttgatgtggagctcttatcgtaacgatgcgtttcgtgactctcctggcggtattacactgacgagctcatgggaccctagcactggaattgtatccgatcgcactagtaccgttaccgggcacgacatgttttgccccggtatctcgatggacgggaacggtcagatcgtggtcagcggtggtaatgatgcaaagaaaacttccttatatgattcgagctcggactcttggattccgggcccggatatgcaggtcgcgcgtgggtatcaatcaagtgcgactatgagtgatgggcgcgtatttacgattggcggcagttttagtggcggtcaagttgagaagaacggggaggtttactccccgagctcgaagacttggacttcgctgccgaatgcaaaagttaaccccatgctgaccgccgataaacggggtctgtaccgtagcgataatcatgcttggctgtttgggtggaaaaagggtagcgtcttccaagcaggtccaagtactgccatgaactggtattatacatctgggtcgggggacgttaagagtgcagggaagcgtcaatcagaccgcggagtagccccagacgccatgtgcggtaatgccgtaatgtacgacgcagtcaaaggcaaaattttgactttcgggggctcgcccgattatgaggactcagatgcgactacaaatgcccatattatcacgctgggcgagcctggcacgagtccgaatacggtatttgcgagtaatgggttaaatttcgctcgtacctttcatacctcggtggtccttccggacgggagtgtattcatcacaggaggccagcagcgcgcggttccactggaagatagcacacccgtatttactccagagatctacgttcccgaacaagatactttttacaagcaaaacccgaatagtatcgttcgtgcctatcattcgatcagcttgttgctgccggacggacgtgttttcaatggtggcggtggcttatgcggcgattgtgagacgaaccactttgatgcgcaaatctttacgccgaattatctttacgatagcaacgggaacttagccactcgccctaaaatcacccgtacctcaacccagtcagtcaaggtcggcgggtggatcaccatttggactgacatgtcgatctcggccgcaagtttaattcgctacggaactgctactcacacggtgaacaccgatcagcgacgcatcggcttgacgttacgtaacaacggaggtaattcgtacagctttcaagttccgtcggacagcggggttgctcttccgggatactggatgttgttcgttatgaattccgctggtgtaccctccgttgcgtcgacgattaatgttacccagggccaaactggccaccatcaccatcaccattag

SEQ ID NO: 228 - protein, 650 aa, Artificial Sequence
  Engineered variant of Galactose Oxidase from Fusarium graminearum
MASAPIGVAIPRNNWAVTCDSAQSGNECIKAIDGNKDTFWHTQYGVNGDPKPPHTITIDMKTVQNVNGLSVLPRQDGNQNGWIGRHEVYLSSDGVNWGSPVASGSWFADSTTKYSNFETRPARYVRLVAITEANGQPWTSIAEINVFQASSYTAPQPELGRWGPTIDLPIVPSAAAIEPTSGRVLMWSSYRNDAFRDSPGGITLTSSWDPSTGIVSDRTSTVTGHDMFCPGISMDGNGQIVVSGGNDAKKTSLYDSSSDSWIPGPDMQVARGYQSSATMSDGRVFTIGGSFSGGQVEKNGEVYSPSSKTWTSLPNAKVNPMLTADKRGLYRSDNHAWLFGWKKGSVFQAGPSTAMNWYYTSGSGDVKSAGKRQSDRGVAPDAMCGNAVMYDAVKGKILTFGGSPDYEDSDATTNAHIITLGEPGTSPNTVFASNGLNFARTFHTSVVLPDGSVFITGGQQRAVPLEDSTPVFTPEIYVPEQDTFYKQNPNSIVRAYHSISLLLPDGRVFNGGGGLCGDCETNHFDAQIFTPNYLYDSNGNLATRPKITRTSTQSVKVGGWITIWTDMSISAASLIRYGTATHTVNTDQRRIGLTLRNNGGNSYSFQVPSDSGVALPGYWMLFVMNSAGVPSVASTINVTQGQTGHHHHHH

SEQ ID NO: 229 - DNA, 1953 bp, Artificial Sequence
  Engineered variant of Galactose Oxidase from Fusarium graminearum
atggcatcagcaccgatcggggtagccatcccgcgcaacaactgggccgttacatgcgattccgcccagagtgggaatgaatgcattaaggcaattgacggtaataaagacacgttttggcacactcaatatggtgtgaacggagatcccaaaccgccgcacaccatcacgatcgatatgaaaacagtacaaaacgtgaatggcctttctgtactgccacgtcaggatggcaatcagaatggatggatcggacgtcacgaggtgtatttaagttctgatggggtgaattggggatcgcctgtagcgtctgggtcctggtttgccgattccaccacaaagtactctaattttgagacacgtccggcccgttacgtgcgccttgtcgccattaccgaagccaatgggcaaccgtggacttcaattgccgagattaacgtatttcaggcgtctagttacactgccccgcagccggagttggggtgctggggcccgacaatcgatcttcccattgtgccatcggccgccgcaatcgagccaacgagcggtcgtgtcttgatgtggagctcttatcgtaacgatgcgtttcgtgactctcctggcggtattacactgacgagctcatgggaccctagcactggaattgtatccgatcgcactagtaccgttaccgggcacgacatgttttgccccggtatctcgatggacgggaacggtcagatcgtggtcagcggtggtaatgatgcaaagaaaacttccttatatgattcgagctcggactcttggattccgggcccggatatgcaggtcgcgcgtgggtatcaatcaagtgcgactatgagtgatgggcgcgtatttacgattggcggcagttttagtggcggtcaagttgagaagaacggggaggtttactccccgagctcgaagacttggacttcgctgccgaatgcaaaagttaaccccatgctgaccgccgataaacggggtctgtaccgtagcgataatcatgcttggctgtttgggtggaaaaagggtagcgtcttccaagcaggtccaagtactgccatgaactggtattatacatctgggtcgggggacgttaagagtgcagggaagcgtcaatcagaccgcggagtagccccagacgccatgtgcggtaatgccgtaatgtacgacgcagtcaaaggcaaaattttgactttcgggggctcgcccgattatgaggactcagatgcgactacaaatgcccatattatcacgctgggcgagcctggcacgagtccgaatacggtatttgcgagtaatgggttaaatttcgctcgtacctttcatacctcggtggtccttccggacgggagtgtattcatcacaggaggccagcagcgcgcggttccactggaagatagcacacccgtatttactccagagatctacgttcccgaacaagatactttttacaagcaaaacccgaatagtatcgttcgtgcctatcattcgatcagcttgttgctgccggacggacgtgttttcaatggtggcggtggcttatgcggcgattgtgagacgaaccactttgatgcgcaaatctttacgccgaattatctttacgatagcaacgggaacttagccactcgccctaaaatcacccgtacctcaacccagtcagtcaaggtcggcgggtggatcaccatttctactgacatgtcgatctcggccgcaagtttaattcgctacggaactgctactcacacggtgaacaccgatcagcgacgcatcggcttgacgttaacgaacaacggaggtaattcgtacagctttcaagttccgtcggacagcggggttgctcttccgggatactggatgttgttcgttatgaattccgctggtgtaccctccgttgcgtcgacgattaatgttacccagggccaaactggccaccatcaccatcaccattag

SEQ ID NO: 230 - protein, 650 aa, Artificial Sequence
  Engineered variant of Galactose Oxidase from Fusarium graminearum
MASAPIGVAIPRNNWAVTCDSAQSGNECIKAIDGNKDTFWHTQYGVNGDPKPPHTITIDMKTVQNVNGLSVLPRQDGNQNGWIGRHEVYLSSDGVNWGSPVASGSWFADSTTKYSNFETRPARYVRLVAITEANGQPWTSIAEINVFQASSYTAPQPELGCWGPTIDLPIVPSAAAIEPTSGRVLMWSSYRNDAFRDSPGGITLTSSWDPSTGIVSDRTSTVTGHDMFCPGISMDGNGQIVVSGGNDAKKTSLYDSSSDSWIPGPDMQVARGYQSSATMSDGRVFTIGGSFSGGQVEKNGEVYSPSSKTWTSLPNAKVNPMLTADKRGLYRSDNHAWLFGWKKGSVFQAGPSTAMNWYYTSGSGDVKSAGKRQSDRGVAPDAMCGNAVMYDAVKGKILTFGGSPDYEDSDATTNAHIITLGEPGTSPNTVFASNGLNFARTFHTSVVLPDGSVFITGGQQRAVPLEDSTPVFTPEIYVPEQDTFYKQNPNSIVRAYHSISLLLPDGRVFNGGGGLCGDCETNHFDAQIFTPNYLYDSNGNLATRPKITRTSTQSVKVGGWITISTDMSISAASLIRYGTATHTVNTDQRRIGLTLTNNGGNSYSFQVPSDSGVALPGYWMLFVMNSAGVPSVASTINVTQGQTGHHHHHH

SEQ ID NO: 231 - DNA, 1953 bp, Artificial Sequence
  Engineered variant of Galactose Oxidase from Fusarium graminearum
atggcatcagcaccgatcggggtagccatcccgcgcaacaactgggccgttacatgcgattccgcccagagtgggaatgaatgcattaaggcaattgacggtaataaagacacgttttggcacactcaatatggtgtgaacggagatcccaaaccgccgcacaccatcacgatcgatatgaaaacagtacaaaacgtgaatggcctttctgtactgccacgtcaggatggcaatcagaatggatggatcggacgtcacgaggtgtatttaagttctgatggggtgaattggggatcgcctgtagcgtctgggtcctggtttgccgattccaccacaaagtactctaattttgagacacgtccggcccgttacgtgcgccttgtcgccattaccgaagccaatgggcaaccgtggacttcaattgccgagattaacgtatttcaggcgtctagttacactgccccgcagccggagttggggcgctggggcccgacaatcgatcttcccattgtgccatcggccgccgcaatcgagccaacgagcggtcgtgtcttgatgtggagctcttatcgtaacgatgcgtttcgtgactctcctggcggtattacactgacgagctcatgggaccctagcactggaattgtatccgatcgcactagtaccgttaccgggcacgacatgttttgccccggtatctcgatggacgggaacggtcagatcgtggtcagcggtggtaatgatgcaaagaaaacttccttatatgattcgagctcggactcttggattccgggcccggatatgcaggtcgcgcgtgggtatcaatcaagtgcgactatgagtgatgggcgcgtatttacgattggcggcagttttagtggcggtcaagttgagaagaacggggaggtttactccccgagctcggggacttggacttcgctgccgaatgcaaaagttaaccccatgctgaccgccgataaacggggtctgtaccgtagcgataatcatgcttggctgtttgggtggaaaaagggtagcgtcttccaagcaggtccaagtactgccatgaactggtattatacatctgggtcgggggacgttaagagtgcagggaagcgtcaatcagaccgcggagtagccccagacgccatgtgcggtaatgccgtaatgtacgacgcagtcaaaggcaaaattttgactttcgggggctcgcccgattatgaggactcagatgcgactacaaatgcccatattatcacgctgggcgagcctggcacgagtccgaatacggtatttgcgagtaatgggttaaatttcgctcgtacctttcatacctcggtggtccttccggacgggagtgtattcatcacaggaggccagcagcgcgcggttccactggaagatagcacacccgtatttactccagagatctacgttcccgaacaagatactttttacaagcaaaacccgaatagtatcgttcgtgcctatcattcgatcagcttgttgctgccggacggacgtgttttcaatggtggcggtggcttatgcggcgattgtgagacgaaccactttgatgcgcaaatctttacgccgaattatctttacgatagcaacgggaacttagccactcgccctaaaatcacccgtacctcaacccagtcagtcaaggtcggcgggtggatcaccatttggactgacatgtcgatctcggccgcaagtttaattcgctacggaactgctactcacacggtgaacaccgatcagcgacgcatcggcttgacgttaacgaacaacggaggtaattcgtacagctttcaagttccgtcggacagcggggttgctcttccgggatactggatgttgttcgttatgaattccgctggtgtaccctccgttgcgtcgacgattaatgttacccagggccaaactggccaccatcaccatcaccattag

SEQ ID NO: 232 - protein, 650 aa, Artificial Sequence
  Engineered variant of Galactose Oxidase from Fusarium graminearum
MASAPIGVAIPRNNWAVTCDSAQSGNECIKAIDGNKDTFWHTQYGVNGDPKPPHTITIDMKTVQNVNGLSVLPRQDGNQNGWIGRHEVYLSSDGVNWGSPVASGSWFADSTTKYSNFETRPARYVRLVAITEANGQPWTSIAEINVFQASSYTAPQPELGRWGPTIDLPIVPSAAAIEPTSGRVLMWSSYRNDAFRDSPGGITLTSSWDPSTGIVSDRTSTVTGHDMFCPGISMDGNGQIVVSGGNDAKKTSLYDSSSDSWIPGPDMQVARGYQSSATMSDGRVFTIGGSFSGGQVEKNGEVYSPSSGTWTSLPNAKVNPMLTADKRGLYRSDNHAWLFGWKKGSVFQAGPSTAMNWYYTSGSGDVKSAGKRQSDRGVAPDAMCGNAVMYDAVKGKILTFGGSPDYEDSDATTNAHIITLGEPGTSPNTVFASNGLNFARTFHTSVVLPDGSVFITGGQQRAVPLEDSTPVFTPEIYVPEQDTFYKQNPNSIVRAYHSISLLLPDGRVFNGGGGLCGDCETNHFDAQIFTPNYLYDSNGNLATRPKITRTSTQSVKVGGWITIWTDMSISAASLIRYGTATHTVNTDQRRIGLTLTNNGGNSYSFQVPSDSGVALPGYWMLFVMNSAGVPSVASTINVTQGQTGHHHHHH

SEQ ID NO: 233 - DNA, 1953 bp, Artificial Sequence
  Engineered variant of Galactose Oxidase from Fusarium graminearum
atggcatcagcaccgatcggggtagccatcccgcgcaacaactgggccgttacatgcgattccgcccagagtgggaatgaatgcattaaggcaattgacggtaataaagacacgttttggcacactcaatatggtgtgaacggagatcccaaaccgccgcacaccatcacgatcgatatgaaaacagtacaaaacgtgaatggcctttctgtactgccacgtcaggatggcaatcagaatggatggatcggacgtcacgaggtgtatttaagttctgatggggtgaattggggatcgcctgtagcgtctgggtcctggtttgccgattccaccacaaagtactctaattttgagacacgtccggcccgttacgtgcgccttgtcgccattaccgaagccaatgggcaaccgtggacttcaattgccgagattaacgtatttcaggcgtctagttacactgccccgcagccggagttggggcgctggggcccgacaatcgatcttcccattgtgccatcggccgccgcaatcgagccaacgagcggtcgtgtcttgatgtggagctcttatcgtaacgatgcgtttcgtgactctcctggcggtattacactgacgagctcatgggaccctagcactggaattgtatccgatcgcactagtaccgttaccgggcacgacatgttttgccccggtatctcgatggacgggaacggtcagatcgtggtcagcggtggtaatgatgcaaagaaaacttccttatatgattcgagctcggactcttggattgttggcccggatatgcaggtcgcgcgtgggtatcaatcaagtgcgactatgagtgatgggcgcgtatttacgattggcggcagttttagtggcggtcaagttgagaagaacggggaggtttactccccgagctcgaagacttggacttcgctgccgaatgcaaaagttaaccccatgctgaccgccgataaacggggtctgtaccgtagcgataatcatgcttggctgtttgggtggaaaaagggtagcgtcttccaagcaggtccaagtactgccatgaactggtattatacatctgggtcgggggacgttaagagtgcagggaagcgtcaatcagaccgcggagtagccccagacgccatgtgcggtaatgccgtaatgtacgacgcagtcaaaggcaaaattttgactttcgggggctcgcccgattatgaggactcagatgcgactacaaatgcccatattatcacgctgggcgagcctggcacgagtccgaatacggtatttgcgagtaatgggttaaatttcgctcgtacctttcatacctcggtggtccttccggacgggagtgtattcatcacaggaggccagcagcgcgcggttccactggaagatagcacacccgtatttactccagagatctacgttcccgaacaagatactttttacaagcaaaacccgaatagtatcgttcgtgcctatcattcgatcagcttgttgctgccggacggacgtgttttcaatggtggcggtggcttatgcggcgattgtgagacgaaccactttgatgcgcaaatctttacgccgaattatctttacgatagcaacgggaacttagccactcgccctaaaatcacccgtacctcaacccagtcagtcaaggtcggcgggtggatcaccatttggactgacatgtcgatctcggccgcaagtttaattcgctacggaactgctactcacacggtgaacaccgatcagcgacgcatcggcttgacgttaacgaacaacggaggtaattcgtacagctttcaagttccgtcggacagcggggttgctcttccgggatactggatgttgttcgttatgaattccgctggtgtaccctccgttgcgtcgacgattaatgttacccagggccaaactggccaccatcaccatcaccattag

SEQ ID NO: 234 - protein, 650 aa, Artificial Sequence
  Engineered variant of Galactose Oxidase from Fusarium graminearum
MASAPIGVAIPRNNWAVTCDSAQSGNECIKAIDGNKDTFWHTQYGVNGDPKPPHTITIDMKTVQNVNGLSVLPRQDGNQNGWIGRHEVYLSSDGVNWGSPVASGSWFADSTTKYSNFETRPARYVRLVAITEANGQPWTSIAEINVFQASSYTAPQPELGRWGPTIDLPIVPSAAAIEPTSGRVLMWSSYRNDAFRDSPGGITLTSSWDPSTGIVSDRTSTVTGHDMFCPGISMDGNGQIVVSGGNDAKKTSLYDSSSDSWIVGPDMQVARGYQSSATMSDGRVFTIGGSFSGGQVEKNGEVYSPSSKTWTSLPNAKVNPMLTADKRGLYRSDNHAWLFGWKKGSVFQAGPSTAMNWYYTSGSGDVKSAGKRQSDRGVAPDAMCGNAVMYDAVKGKILTFGGSPDYEDSDATTNAHIITLGEPGTSPNTVFASNGLNFARTFHTSVVLPDGSVFITGGQQRAVPLEDSTPVFTPEIYVPEQDTFYKQNPNSIVRAYHSISLLLPDGRVFNGGGGLCGDCETNHFDAQIFTPNYLYDSNGNLATRPKITRTSTQSVKVGGWITIWTDMSISAASLIRYGTATHTVNTDQRRIGLTLTNNGGNSYSFQVPSDSGVALPGYWMLFVMNSAGVPSVASTINVTQGQTGHHHHHH

SEQ ID NO: 235 - DNA, 1953 bp, Artificial Sequence
  Engineered variant of Galactose Oxidase from Fusarium graminearum
atggcatcagcaccgatcggggtagccatcccgcgcaacaactgggccgttacatgcgattccgcccagagtgggaatgaatgcattaaggcaattgacggtaataaagacacgttttggcacactcaatatggtgtgaacggagatcccaaaccgccgcacaccatcacgatcgatatgaaaacagtacaaaacgtgaatggcctttctgtactgccacgtcaggatggcaatcagaatggatggatcggacgtcacgaggtgtatttaagttctgatggggtgaattggggatcgcctgtagcgtctgggtcctggtttgccgattccaccacaaagtactctaattttgagacacgtccggcccgttacgtgcgccttgtcgccattaccgaagccaatgggcaaccgtggacttcaattgccgagattaacgtatttcaggcgtctagttacactgccccgcagccggagttggggcgctggggcccgacaatcgatcttcccattgtgccatcggccgccgcaatcgagccaacgagcggtcgtgtcttgatgtggagctcttatcgtaacgatgcgtttcgtgactctcctggcggtattacactgacgagctcatgggaccctagcactggaattgtatccgatcgcactagtaccgttaccgggcacgacatgttttgccccggtatctcgatggacgggaacggtcagatcgtggtcagcggtggtaatgatgcaaagaaaacttccttatatgattcgagctcggactcttggattccgggcccggatatgcaggtcgcgcgtgggtatcaatcaagtgcgactatgagtgatgggcgcgtatttacgattggcggcagttttagtggcggtcaagttgagaagaacggggaggtttactccccgagctcgaagacttggacttcgctgccgaatgcaaaagttaaccccatgctgaccgccgataaacggggtctgtaccgtagcgataatcatgcttggctgtttgggtggaaaaagggtagcgtcttccaagcaggtccaagtactgccatgaactggtattatacatctgggtcgggggacgttaagagtgcagggaagcgtaggtcagaccgcggagtagccccagacgccatgtgcggtaatgccgtaatgtacgacgcagtcaaaggcaaaattttgactttcgggggctcgcccgattatgaggactcagatgcgactacaaatgcccatattatcacgctgggcgagcctggcacgagtccgaatacggtatttgcgagtaatgggttaaatttcgctcgtacctttcatacctcggtggtccttccggacgggagtgtattcatcacaggaggccagcagcgcgcggttccactggaagatagcacacccgtatttactccagagatctacgttcccgaacaagatactttttacaagcaaaacccgaatagtatcgttcgtgcctatcattcgatcagcttgttgctgccggacggacgtgttttcaatggtggcggtggcttatgcggcgattgtgagacgaaccactttgatgcgcaaatctttacgccgaattatctttacgatagcaacgggaacttagccactcgccctaaaatcacccgtacctcaacccagtcagtcaaggtcggcgggtggatcaccatttggactgacatgtcgatctcggccgcaagtttaattcgctacggaactgctactcacacggtgaacaccgatcagcgacgcatcggcttgacgttaacgaacaacggaggtaattcgtacagctttcaagttccgtcggacagcggggttgctcttccgggatactggatgttgttcgttatgaattccgctggtgtaccctccgttgcgtcgacgattaatgttacccagggccaaactggccaccatcaccatcaccattag

SEQ ID NO: 236 - protein, 650 aa, Artificial Sequence
  Engineered variant of Galactose Oxidase from Fusarium graminearum
MASAPIGVAIPRNNWAVTCDSAQSGNECIKAIDGNKDTFWHTQYGVNGDPKPPHTITIDMKTVQNVNGLSVLPRQDGNQNGWIGRHEVYLSSDGVNWGSPVASGSWFADSTTKYSNFETRPARYVRLVAITEANGQPWTSIAEINVFQASSYTAPQPELGRWGPTIDLPIVPSAAAIEPTSGRVLMWSSYRNDAFRDSPGGITLTSSWDPSTGIVSDRTSTVTGHDMFCPGISMDGNGQIVVSGGNDAKKTSLYDSSSDSWIPGPDMQVARGYQSSATMSDGRVFTIGGSFSGGQVEKNGEVYSPSSKTWTSLPNAKVNPMLTADKRGLYRSDNHAWLFGWKKGSVFQAGPSTAMNWYYTSGSGDVKSAGKRRSDRGVAPDAMCGNAVMYDAVKGKILTFGGSPDYEDSDATTNAHIITLGEPGTSPNTVFASNGLNFARTFHTSVVLPDGSVFITGGQQRAVPLEDSTPVFTPEIYVPEQDTFYKQNPNSIVRAYHSISLLLPDGRVFNGGGGLCGDCETNHFDAQIFTPNYLYDSNGNLATRPKITRTSTQSVKVGGWITIWTDMSISAASLIRYGTATHTVNTDQRRIGLTLTNNGGNSYSFQVPSDSGVALPGYWMLFVMNSAGVPSVASTINVTQGQTGHHHHHH

SEQ ID NO: 237 - DNA, 1953 bp, Artificial Sequence
  Engineered variant of Galactose Oxidase from Fusarium graminearum
atggcatcagcaccgatcggggtagccatcccgcgcaacaactgggccgttacatgcgattccgcccagagtgggaatgaatgcattaaggcaattgacggtaataaagacacgttttggcacactcaatatggtgtgaacggagatcccaaaccgccgcacaccatcacgatcgatatgaaaacagtacaaaacgtgaatggcctttctgtactgccacgtcaggatggcaatcagaatggatggatcggacgtcacgaggtgtatttaagttctgatggggtgaattggggatcgcctgtagcgtctgggtcctggtttgccgattccaccacaaagtactctaattttgagacacgtccggcccgttacgtgcgccttgtcgccattaccgaagccaatgggcaaccgtggacttcaattgccgagattaacgtatttcaggcgtctagttacactgccccgcagccggagttggggcgctggggcccgacaatcgatcttcccattgtgccatcggccgccgcaatcgagccaacgagcggtcgtgtcttgatgtggagctcttatcgtaacgatgcgtttcgtgactctcctggcggtattacactgacgagctcatgggaccctagcactggaattgtatccgatcgcactagtaccgttaccgggcacgacatgttttgccccggtatctcgatggacgggaacggtcagatcgtggtcagcggtggtaatgatgcaaagaaaacttccttatatgattcgagctcggactcttggattccgggcccggatatgcaggtcgcgcgtgggtatcaatcaagtgcgactatgagtgatgggcgcgtatttacgattggcggcagttttagtggcggtcaagttgagaagaacggggaggtttactccccgagctcgaagacttggacttcgctgccgaatgcaaaagttaaccccatgctgaccgccgataaacggggtctgtaccgtagcgataatcatgcttggctgtttgggtggaaaaagggtagcgtcttccaagcaggtccaagtactgccatgaactggtattatacatctgggtcgggggacgttaagagtgcagggaagcgtcaatcagaccgcggagtagccccagacgccatgtgcggtaatgccgtaatgtacgacgcagtcaaaggcaaaattttgactttcgggggctcgcccgattatgaggactcagatgcgactacaaatgcccatattatcacgctgggcgagcctggcacgagtccgaatacggtatttgcgagtaatgggttaaatttcgctcgtacctttcatacctcggtggtccttccggacgggagtgtattcatcacaggaggccagcagcgcgcggttccactggaagatagcacacccgtatttactccagagatctacgttcccgaacaagatactttttacaagcaaaacccgaatagtatcgttcgtgcctatcattcgatcagcttgttgctgccggacggacgtgttttcaatggtggcggtggcttatgcggcgattgtgagacgaaccactttgatgcgcaaatctttacgccgaattatctttacgatagcaacgggaacttagccactcgccctaaaatcacccgtacctcaacccagtcagtcaaggtcggcgggtggatcaccattcgtactgacatgtcgatctcggccgcaagtttaattcgctacggaactgctactcacacggtgaacaccgatcagcgacgcatcggcttgacgttaacgaacaacggaggtaattcgtacagctttcaagttccgtcggacagcggggttgctcttccgggatactggatgttgttcgttatgaattccgctggtgtaccctccgttgcgtcgacgattaatgttacccagggccaaactggccaccatcaccatcaccattag

SEQ ID NO: 238 - protein, 650 aa, Artificial Sequence
  Engineered variant of Galactose Oxidase from Fusarium graminearum
MASAPIGVAIPRNNWAVTCDSAQSGNECIKAIDGNKDTFWHTQYGVNGDPKPPHTITIDMKTVQNVNGLSVLPRQDGNQNGWIGRHEVYLSSDGVNWGSPVASGSWFADSTTKYSNFETRPARYVRLVAITEANGQPWTSIAEINVFQASSYTAPQPELGRWGPTIDLPIVPSAAAIEPTSGRVLMWSSYRNDAFRDSPGGITLTSSWDPSTGIVSDRTSTVTGHDMFCPGISMDGNGQIVVSGGNDAKKTSLYDSSSDSWIPGPDMQVARGYQSSATMSDGRVFTIGGSFSGGQVEKNGEVYSPSSKTWTSLPNAKVNPMLTADKRGLYRSDNHAWLFGWKKGSVFQAGPSTAMNWYYTSGSGDVKSAGKRQSDRGVAPDAMCGNAVMYDAVKGKILTFGGSPDYEDSDATTNAHIITLGEPGTSPNTVFASNGLNFARTFHTSVVLPDGSVFITGGQQRAVPLEDSTPVFTPEIYVPEQDTFYKQNPNSIVRAYHSISLLLPDGRVFNGGGGLCGDCETNHFDAQIFTPNYLYDSNGNLATRPKITRTSTQSVKVGGWITIRTDMSISAASLIRYGTATHTVNTDQRRIGLTLTNNGGNSYSFQVPSDSGVALPGYWMLFVMNSAGVPSVASTINVTQGQTGHHHHHH

SEQ ID NO: 239 - DNA, 1953 bp, Artificial Sequence
  Engineered variant of Galactose Oxidase from Fusarium graminearum
atggcatcagcaccgatcggggtagccatcccgcgcaacaactgggccgttacatgcgattccgcccagagtgggaatgaatgcattaaggcaattgacggtaataaagacacgttttggcacactcaatatggtgtgaacggagatcccaaaccgccgcacaccatcacgatcgatatgaaaacagtacaaaacgtgaatggcctttctgtactgccacgtcaggatggcaatcagaatggatggatcggacgtcacgaggtgtatttaagttctgatggggtgaattggggatcgcctgtagcgtctgggtcctggtttgccgattccaccacaaagtactctaattttgagacacgtccggcccgttacgtgcgccttgtcgccattaccgaagccaatgggcaaccgtggacttcaattgccgagattaacgtatttcaggcgtctagttacactgccccgcagccggagttggggcgctggggcccgacaatcgatcttcccattgtgccatcggccgccgcaatcgagccaacgagcggtcgtgtcttgatgtggagctcttatcgtaacgatgcgtttcgtgactctcctggcggtattacactgacgagctcatgggaccctagcactggaattgtatccgatcgcactagtaccgttaccgggcacgacatgttttgccccggtatctcgatggacgggaacggtcagatcgtggtcagcggtggtaatgatgcaaagaaaacttccttatatgattcgagctcggactcttggattccgggcccggatatgcaggtcgcgcgtgggtatcaatcaagtgcgactatgagtgatgggcgcgtatttacgattggcggcagttttagtggcggtcaagttgagaagaacggggaggtttactccccgagctcgaagacttggacttcgctgccgaatgcaaaagttaaccccatgctgaccgccgataaacggggtctgtaccgtagcgataatcatgcttggctgtttgggtggaaaaagggtagcgtcttccaagcaggtccaagtactgccatgaactggtattatacatctgggtcgggggacgttaagagtgcagggaagcgtcaatcagaccgcggagtagccccagacgccatgtgcggtaatgccgtaatgtacgacgcagtcaaaggcaaaattttgactttcgggggctcgcccgattatgaggactcagatgcgactacaaatgcccatattatcacgctgggcgagcctggcacgagtccgaatacggtatttgcgagtaatgggttaaatttcgctcgtacctttcatacctcggtggtccttccggacgggagtgtattcatcacaggaggccagcagcgcgcggttccactggaagatagcacacccgtatttactccagagatctacgttcccgaacaagatactttttacaagcaaaacccgaatagtatcgttcgtgcctatcattcgatcagcttgttgctgccggacggacgtgttttcaatggtggcggtggcttatgcggcgattgtgagacgaaccactttgatgcgcaaatctttacgccgaattatctttacgatagcaacgggaacttagccactcgccctaaaatcacccgtacctcaaccacttcagtcaaggtcggcgggtggatcaccatttggactgacatgtcgatctcggccgcaagtttaattcgctacggaactgctactcacacggtgaacaccgatcagcgacgcatcggcttgacgttaacgaacaacggaggtaattcgtacagctttcaagttccgtcggacagcggggttgctcttccgggatactggatgttgttcgttatgaattccgctggtgtaccctccgttgcgtcgacgattaatgttacccagggccaaactggccaccatcaccatcaccattag

SEQ ID NO: 240 - protein, 650 aa, Artificial Sequence
  Engineered variant of Galactose Oxidase from Fusarium graminearum
MASAPIGVAIPRNNWAVTCDSAQSGNECIKAIDGNKDTFWHTQYGVNGDPKPPHTITIDMKTVQNVNGLSVLPRQDGNQNGWIGRHEVYLSSDGVNWGSPVASGSWFADSTTKYSNFETRPARYVRLVAITEANGQPWTSIAEINVFQASSYTAPQPELGRWGPTIDLPIVPSAAAIEPTSGRVLMWSSYRNDAFRDSPGGITLTSSWDPSTGIVSDRTSTVTGHDMFCPGISMDGNGQIVVSGGNDAKKTSLYDSSSDSWIPGPDMQVARGYQSSATMSDGRVFTIGGSFSGGQVEKNGEVYSPSSKTWTSLPNAKVNPMLTADKRGLYRSDNHAWLFGWKKGSVFQAGPSTAMNWYYTSGSGDVKSAGKRQSDRGVAPDAMCGNAVMYDAVKGKILTFGGSPDYEDSDATTNAHIITLGEPGTSPNTVFASNGLNFARTFHTSVVLPDGSVFITGGQQRAVPLEDSTPVFTPEIYVPEQDTFYKQNPNSIVRAYHSISLLLPDGRVFNGGGGLCGDCETNHFDAQIFTPNYLYDSNGNLATRPKITRTSTTSVKVGGWITIWTDMSISAASLIRYGTATHTVNTDQRRIGLTLTNNGGNSYSFQVPSDSGVALPGYWMLFVMNSAGVPSVASTINVTQGQTGHHHHHH

SEQ ID NO: 241 - DNA, 1953 bp, Artificial Sequence
  Engineered variant of Galactose Oxidase from Fusarium graminearum
atggcatcagcaccgatcggggtagccatcccgcgcaacaactgggccgttacatgcgattccgcccagagtgggaatgaatgcattaaggcaattgacggtaataaagacacgttttggcacactcaatatggtgtgaacggagatcccaaaccgccgcacaccatcacgatcgatatgaaaacagtacaaaacgtgaatggcctttctgtactgccacgtcaggatggcaatcagaatggatggatcggacgtcacgaggtgtatttaagttctgatggggtgaattggggatcgcctgtagcgtctgggtcctggtttgccgattccaccacaaagtactctaattttgagacacgtccggcccgttacgtgcgccttgtcgccattaccgaagccaatgggcaaccgtggacttcaattgccgagattaacgtatttcaggcgtctagttacactgccccgcagccggagttggggcgctggggcccgacaatcgatcttcccattgtgccatcggccgccgcaatcgagccaacgagcggtcgtgtcttgatgtggagctcttatcgtaacgatgcgtttcgtgactctcctggcggtattacactgacgagctcatgggaccctagcactggaattgtatccgatcgcactagtaccgttaccgggcacgacatgttttgccccggtatctcgatggacgggaacggtcagatcgtggtcagcggtggtaatgatgcaaagaaaacttccttatatgattcgagctcggactcttggattccgggcccggatatgcaggtcgcgcgtgggtatcaatcaagtgcgactatgagtgatgggcgcgtatttacgattggcggcagttttagtggcggtcaagttgagaagaacggggaggtttactccccgagctcgaagacttggacttcgctgccgaatgcaaaagttaaccccatgctgaccgccgataaacggggtctgtaccgtagcgataatcatgcttggctgtttgggtggaaaaagggtagcgtcttccaagcaggtccaagtactgccatgaactggtattatacaacggggtcgggggacgttaagagtgcagggaagcgtcaatcagaccgcggagtagccccagacgccatgtgcggtaatgccgtaatgtacgacgcagtcaaaggcaaaattttgactttcgggggctcgcccgattatgaggactcagatgcgactacaaatgcccatattatcacgctgggcgagcctggcacgagtccgaatacggtatttgcgagtaatgggttaaatttcgctcgtacctttcatacctcggtggtccttccggacgggagtgtattcatcacaggaggccagcagcgcgcggttccactggaagatagcacacccgtatttactccagagatctacgttcccgaacaagatactttttacaagcaaaacccgaatagtatcgttcgtgcctatcattcgatcagcttgttgctgccggacggacgtgttttcaatggtggcggtggcttatgcggcgattgtgagacgaaccactttgatgcgcaaatctttacgccgaattatctttacgatagcaacgggaacttagccactcgccctaaaatcacccgtacctcaacccagtcagtcaaggtcggcgggtggatcaccatttggactgacatgtcgatctcggccgcaagtttaattcgctacggaactgctactcacacggtgaacaccgatcagcgacgcatcggcttgacgttaacgaacaacggaggtaattcgtacagctttcaagttccgtcggacagcggggttgctcttccgggatactggatgttgttcgttatgaattccgctggtgtaccctccgttgcgtcgacgattaatgttacccagggccaaactggccaccatcaccatcaccattag

SEQ ID NO: 242 - protein, 650 aa, Artificial Sequence
  Engineered variant of Galactose Oxidase from Fusarium graminearum
MASAPIGVAIPRNNWAVTCDSAQSGNECIKAIDGNKDTFWHTQYGVNGDPKPPHTITIDMKTVQNVNGLSVLPRQDGNQNGWIGRHEVYLSSDGVNWGSPVASGSWFADSTTKYSNFETRPARYVRLVAITEANGQPWTSIAEINVFQASSYTAPQPELGRWGPTIDLPIVPSAAAIEPTSGRVLMWSSYRNDAFRDSPGGITLTSSWDPSTGIVSDRTSTVTGHDMFCPGISMDGNGQIVVSGGNDAKKTSLYDSSSDSWIPGPDMQVARGYQSSATMSDGRVFTIGGSFSGGQVEKNGEVYSPSSKTWTSLPNAKVNPMLTADKRGLYRSDNHAWLFGWKKGSVFQAGPSTAMNWYYTTGSGDVKSAGKRQSDRGVAPDAMCGNAVMYDAVKGKILTFGGSPDYEDSDATTNAHIITLGEPGTSPNTVFASNGLNFARTFHTSVVLPDGSVFITGGQQRAVPLEDSTPVFTPEIYVPEQDTFYKQNPNSIVRAYHSISLLLPDGRVFNGGGGLCGDCETNHFDAQIFTPNYLYDSNGNLATRPKITRTSTQSVKVGGWITIWTDMSISAASLIRYGTATHTVNTDQRRIGLTLTNNGGNSYSFQVPSDSGVALPGYWMLFVMNSAGVPSVASTINVTQGQTGHHHHHH

SEQ ID NO: 243 - DNA, 1953 bp, Artificial Sequence
  Engineered variant of Galactose Oxidase from Fusarium graminearum
atggcatcagcaccgatcggggtagccatcccgcgcaacaactgggccgttacatgcgattccgcccagagtgggaatgaatgcattaaggcaattgacggtaataaagacacgttttggcacactcaatatggtgtgaacggagatcccaaaccgccgcacaccatcacgatcgatatgaaaacagtacaaaacgtgaatggcctttctgtactgccacgtcaggatggcaatcagaatggatggatcggacgtcacgaggtgtatttaagttctgatggggtgaattggggatcgcctgtagcgtctgggtcctggtttgccgattccaccacaaagtactctaattttgagacacgtccggcccgttacgtgcgccttgtcgccattaccgaagccaatgggcaaccgtggacttcaattgccgagattaacgtatttcaggcgtctagttacactgccccgcagccggagttggggcgctggggcccgacaatcgatcttcccattgtgccatcggccgccgcaatcgagccaacgagcggtcgtgtcttgatgtggagctcttatcgtaacgatgcgtttcgtgactctcctggcggtattacactgacgagctcatgggaccctagcactggaattgtatccgatcgcactagtaccgttaccgggcacgacatgttttgccccggtatctcgatggacgggaacggtcagatcgtggtcagcggtggtaatgatgcaaagaaaacttccttatatgattcgagctcggactcttggattccgggcccggatatgcaggtcgcgcgtgggtatcaatcaagtgcgactatgagtgatgggcgcgtatttacgattggcggcagttttagtggcggtcaagttgagaagaacggggaggtttactccccgagctcgaagacttggacttcgctgccgaatgcaaaagttaaccccatgctgaccgccgataaacggggtctgtaccgtagcgataatcatgcttggctgtttgggtggaaaaagggtagcgtcttccaagcaggtccaagtactgccatgaactggtattatacatctgggtcgggggacgttaagagtgcagggaagcgtcaatcagaccgcggagtagccccagacgccatgtgcggtaatgccgtaatgtacgacgcagtcaaaggcaaaattttgactttcgggggctcgcccgattatgaggactcagatgcgactacaaatgcccatattatcacgctgggcgagcctggcacgagtccgaatacggtatttgcgagtaatgggttaaatttcgctcgtacctttcatacctcggtggtccttccggacgggagtgtattcatcacaggaggccagcagcgcgcggttccactggaagatagcacacccgtatttactccagagatctacgttcccgaacaagatactttttacaagcaaaacccgaatagtatcgttcgtgcctatcattcgatcagcttgttgctgccggacggacgtgttttcaatggtggcggtggcttatgcggcgattgtgagacgaaccactttgatgcgcaaatctttacgccgaattatctttacgatagcaacgggaacttagccactcgccctaaaatcacccgtacctcaacccagtcagtcaaggtcggcgggtggatcaccatttggactgacatgtcgatctcggccgcaagtttaattcgctacggaactgctactcacacggtgaacaccgatcagcgacgcatcggcttgacgttagtgaacaacggaggtaattcgtacagctttcaagttccgtcggacagcggggttgctcttccgggatactggatgttgttcgttatgaattccgctggtgtaccctccgttgcgtcgacgattaatgttacccagggccaaactggccaccatcaccatcaccattag

SEQ ID NO: 244 - protein, 650 aa, Artificial Sequence
  Engineered variant of Galactose Oxidase from Fusarium graminearum
MASAPIGVAIPRNNWAVTCDSAQSGNECIKAIDGNKDTFWHTQYGVNGDPKPPHTITIDMKTVQNVNGLSVLPRQDGNQNGWIGRHEVYLSSDGVNWGSPVASGSWFADSTTKYSNFETRPARYVRLVAITEANGQPWTSIAEINVFQASSYTAPQPELGRWGPTIDLPIVPSAAAIEPTSGRVLMWSSYRNDAFRDSPGGITLTSSWDPSTGIVSDRTSTVTGHDMFCPGISMDGNGQIVVSGGNDAKKTSLYDSSSDSWIPGPDMQVARGYQSSATMSDGRVFTIGGSFSGGQVEKNGEVYSPSSKTWTSLPNAKVNPMLTADKRGLYRSDNHAWLFGWKKGSVFQAGPSTAMNWYYTSGSGDVKSAGKRQSDRGVAPDAMCGNAVMYDAVKGKILTFGGSPDYEDSDATTNAHIITLGEPGTSPNTVFASNGLNFARTFHTSVVLPDGSVFITGGQQRAVPLEDSTPVFTPEIYVPEQDTFYKQNPNSIVRAYHSISLLLPDGRVFNGGGGLCGDCETNHFDAQIFTPNYLYDSNGNLATRPKITRTSTQSVKVGGWITIWTDMSISAASLIRYGTATHTVNTDQRRIGLTLVNNGGNSYSFQVPSDSGVALPGYWMLFVMNSAGVPSVASTINVTQGQTGHHHHHH

SEQ ID NO: 245 - DNA, 1953 bp, Artificial Sequence
  Engineered variant of Galactose Oxidase from Fusarium graminearum
atggcatcagcaccgatcggggtagccatcccgcgcaacaactgggccgttacatgcgattccgcccagagtgggaatgaatgcattaaggcaattgacggtaataaagacacgttttggcacactcaatatggtgtgaacggagatcccaaaccgccgcacaccatcacgatcgatatgaaaacagtacaaaacgtgaatggcctttctgtactgccacgtcaggatggcaatcagaatggatggatcggacgtcacgaggtgtatttaagttctgatggggtgaattggggatcgcctgtagcgtctgggtcctggtttgccgattccaccacaaagtactctaattttgagacacgtccggcccgttacgtgcgccttgtcgccattaccgaagccaatgggcaaccgtggacttcaattgccgagattaacgtatttcaggcgtctagttacactgccccgcagccggagttggggcgctggggcccgacaatcgatcttcccattgtgccatcggccgccgcaatcgagccaacgagcggtcgtgtcttgatgtggagctcttatcgtaacgatgcgtttcgtgactctcctggcggtattacactgacgagctcatgggaccctagcactggaattgtatccgatcgcactagtaccgttaccgggcacgacatgttttgccccggtatctcgatggacgggaacggtcagatcgtggtcagcggtggtaatgatgcaaagaaaacttccttatatgattcgagctcggactcttggattccgggcccggatatgcaggtcgcgcgtgggtatcaatcaagtgcgactatgagtgatgggcgcgtatttacgattggcggcagttttagtggcggtcaagttgagaagaacggggaggtttactccccgagctcgaagacttggacttcgctgccgaatgcaaaagttaaccccatgctgaccgccgataaacggggtctgtaccgtagcgataatcatgcttggctgtttgggtggaaaaagggtagcgtcttccaagcaggtccaagtactgccatgaactggtattatacatctgggtcgggggacgttaagagtgcagggaagcgtcaatcagaccgcggagtagccccagacgccatgtgcggtaatgccgtaatgtacgacgcagtcaaaggcaaaattttgactttcgggggctcgcccgattatgaggactcagatgcgactacaaatgcccatattatcacgctgggcgagcctggcacgagtccgaatacggtatttgcgagtaatgggttaaatttcgctcgtacctttcatacctcggtggtccttccggacgggagtgtattcatcacaggaggccagcagcgcgcggttccactggaagatagcacacccgtatttactccagagatctacgttcccgaacaagatactttttacaagcaaaacccgaatagtatcgttcgtgcctatcattcgatcagcttgttgctgccggacggacgtgttttcaatggtggcggtggcttatgcggcgattgtgagacgaaccactttgatgcgcaaatctttacgccgaattatctttacgatgtgaacgggaacttagccactcgccctaaaatcacccgtacctcaacccagtcagtcaaggtcggcgggtggatcaccatttggactgacatgtcgatctcggccgcaagtttaattcgctacggaactgctactcacacggtgaacaccgatcagcgacgcatcggcttgacgttaacgaacaacggaggtaattcgtacagctttcaagttccgtcggacagcggggttgctcttccgggatactggatgttgttcgttatgaattccgctggtgtaccctccgttgcgtcgacgattaatgttacccagggccaaactggccaccatcaccatcaccattag

SEQ ID NO: 246 - protein, 650 aa, Artificial Sequence
  Engineered variant of Galactose Oxidase from Fusarium graminearum
MASAPIGVAIPRNNWAVTCDSAQSGNECIKAIDGNKDTFWHTQYGVNGDPKPPHTITIDMKTVQNVNGLSVLPRQDGNQNGWIGRHEVYLSSDGVNWGSPVASGSWFADSTTKYSNFETRPARYVRLVAITEANGQPWTSIAEINVFQASSYTAPQPELGRWGPTIDLPIVPSAAAIEPTSGRVLMWSSYRNDAFRDSPGGITLTSSWDPSTGIVSDRTSTVTGHDMFCPGISMDGNGQIVVSGGNDAKKTSLYDSSSDSWIPGPDMQVARGYQSSATMSDGRVFTIGGSFSGGQVEKNGEVYSPSSKTWTSLPNAKVNPMLTADKRGLYRSDNHAWLFGWKKGSVFQAGPSTAMNWYYTSGSGDVKSAGKRQSDRGVAPDAMCGNAVMYDAVKGKILTFGGSPDYEDSDATTNAHIITLGEPGTSPNTVFASNGLNFARTFHTSVVLPDGSVFITGGQQRAVPLEDSTPVFTPEIYVPEQDTFYKQNPNSIVRAYHSISLLLPDGRVFNGGGGLCGDCETNHFDAQIFTPNYLYDVNGNLATRPKITRTSTQSVKVGGWITIWTDMSISAASLIRYGTATHTVNTDQRRIGLTLTNNGGNSYSFQVPSDSGVALPGYWMLFVMNSAGVPSVASTINVTQGQTGHHHHHH

SEQ ID NO: 247 - DNA, 1953 bp, Artificial Sequence
  Engineered variant of Galactose Oxidase from Fusarium graminearum
atggcatcagcaccgatcggggtagccatcccgcgcaacaactgggccgttacatgcgattccgcccagagtgggaatgaatgcattaaggcaattgacggtaataaagacacgttttggcacactcaatatggtgtgaacggagatcccaaaccgccgcacaccatcacgatcgatatgaaaacagtacaaaacgtgaatggcctttctgtactgccacgtcaggatggcaatcagaatggatggatcggacgtcacgaggtgtatttaagttctgatggggtgaattggggatcgcctgtagcgtctgggtcctggtttgccgattccaccacaaagtactctaattttgagacacgtccggcccgttacgtgcgccttgtcgccattaccgaagccaatgggcaaccgtggacttcaattgccgagattaacgtatttcaggcgtctagttacactgccccgcagccggagttggggcgctggggcccgacaatcgatcttcccattgtgccatcggccgccgcaatcgagccaacgagcggtcgtgtcttgatgtggagctcttatcgtaacgatgcgtttcgtgactctcctggcggtattacactgacgagctcatgggaccctagcactggaattgtatccgatcgcactagtaccgttaccgggcacgacatgttttgccccggtatctcgatggacgggaacggtcagatcgtggtcagcggtggtaatgatgcaaagaaaacttccttatatgattcgagctcggactcttggattccgggcccggatatgcaggtcgcgcgtgggtatcaatcaagtgcgactatgagtgatgggcgcgtatttacgattggcggcagttttagtggcggtcaagttgagaagaacggggaggtttactccccgagctcgaagacttggacttcgctgccgaatgcaaaagttaaccccatgctgaccgccgataaacggggtctgtaccgtagcgataatcatgcttggctgtttgggtggaaaaagggtagcgtcttccaagcaggtccaagtactgccatgaactggtattatacatctgggtcgggggacgttaagagtgcagggaagcgtcaatcagaccgcggagtagccccagacgccatgtgcggtaatgccgtaatgtacgacgcagtcaaaggcaaaattttgactttcgggggctcgcccgattatgaggactcagatgcgactacaaatgcccatattatcacgctgggcgagcctggcacgagtccgaatacggtatttgcgagtaatgggttaaatttcgctcgtacctttcatacctcggtggtccttccggacgggagtgtattcatcacaggaggccagcagcgcgcggttccactggaagatagcacacccgtatttactccagagatctacgttcccgaacgagatactttttacaagcaaaacccgaatagtatcgttcgtgcctatcattcgatcagcttgttgctgccggacggacgtgttttcaatggtggcggtggcttatgcggcgattgtgagacgaaccactttgatgcgcaaatctttacgccgaattatctttacgatagcaacgggaacttagccactcgccctaaaatcacccgtacctcaacccagtcagtcaaggtcggcgggtggatcaccatttggactgacatgtcgatctcggccgcaagtttaattcgctacggaactgctactcacacggtgaacaccgatcagcgacgcatcggcttgacgttaacgagtaacggaggtaattcgtacagctttcaagttccgtcggacagcggggttgctcttccgggatactggatgttgttcgttatgaattccgctggtgtaccctccgttgcgtcgacgattaatgttacccagggccaaactggccaccatcaccatcaccattag

SEQ ID NO: 248 - protein, 650 aa, Artificial Sequence
  Engineered variant of Galactose Oxidase from Fusarium graminearum
MASAPIGVAIPRNNWAVTCDSAQSGNECIKAIDGNKDTFWHTQYGVNGDPKPPHTITIDMKTVQNVNGLSVLPRQDGNQNGWIGRHEVYLSSDGVNWGSPVASGSWFADSTTKYSNFETRPARYVRLVAITEANGQPWTSIAEINVFQASSYTAPQPELGRWGPTIDLPIVPSAAAIEPTSGRVLMWSSYRNDAFRDSPGGITLTSSWDPSTGIVSDRTSTVTGHDMFCPGISMDGNGQIVVSGGNDAKKTSLYDSSSDSWIPGPDMQVARGYQSSATMSDGRVFTIGGSFSGGQVEKNGEVYSPSSKTWTSLPNAKVNPMLTADKRGLYRSDNHAWLFGWKKGSVFQAGPSTAMNWYYTSGSGDVKSAGKRQSDRGVAPDAMCGNAVMYDAVKGKILTFGGSPDYEDSDATTNAHIITLGEPGTSPNTVFASNGLNFARTFHTSVVLPDGSVFITGGQQRAVPLEDSTPVFTPEIYVPERDTFYKQNPNSIVRAYHSISLLLPDGRVFNGGGGLCGDCETNHFDAQIFTPNYLYDSNGNLATRPKITRTSTQSVKVGGWITIWTDMSISAASLIRYGTATHTVNTDQRRIGLTLTSNGGNSYSFQVPSDSGVALPGYWMLFVMNSAGVPSVASTINVTQGQTGHHHHHH

SEQ ID NO: 249 - DNA, 1953 bp, Artificial Sequence
  Engineered variant of Galactose Oxidase from Fusarium graminearum
atggcatcagcaccgatcggggtagccatcccgcgcaacaactgggccgttacatgcgattccgcccagagtgggaatgaatgcattaaggcaattgacggtaataaagacacgttttggcacactcaatatggtgtgaacggagatcccaaaccgccgcacaccatcacgatcgatatgaaaacagtacaaaacgtgaatggcctttctgtactgccacgtcaggatggcaatcagaatggatggatcggacgtcacgaggtgtatttaagttctgatggggtgaattggggatcgcctgtagcgtctgggtcctggtttgccgattccaccacaaagtactctaattttgagacacgtccggcccgttacgtgcgccttgtcgccattaccgaagccaatgggcaaccgtggacttcaattgccgagattaacgtatttcaggcgtctagttacactgccccgcagccggagttggggcgctggggcccgacaatcgatcttcccattgtgccatcggccgccgcaatcgagccaacgagcggtcgtgtcttgatgtggagctcttatcgtaacgatgcgtttcgtgactctcctggcggtattacactgacgagctcatgggaccctagcactggaattgtatccgatcgcactagtgaggttaccgggcacgacatgttttgccccggtatctcgatggacgggaacggtcagatcgtggtcagcggtggtaatgatgcaaagaaaacttccttatatgattcgagctcggactcttggattccgggcccggatatgcaggtcgcgcgtgggtatcaatcaagtgcgactatgagtgatgggcgcgtatttacgattggcggcagttttagtggcggtcaagttgagaagaacggggaggtttactccccgagctcgaagacttggacttcgctgccgaatgcaaaagttaaccccatgctgaccgccgataaacggggtctgtaccgtagcgataatcatgcttggctgtttgggtggaaaaagggtagcgtcttccaagcaggtccaagtactgccatgaactggtattatacatctgggtcgggggacgttaagagtgcagggaagcgtcaatcagaccgcggagtagccccagacgccatgtgcggtaatgccgtaatgtacgacgcagtcaaaggcaaaattttgactttcgggggctcgcccgattatgaggactcagatgcgactacaaatgcccatattatcacgctgggcgagcctggcacgagtccgaatacggtatttgcgagtaatgggttaaatttcgctcgtacctttcatacctcggtggtccttccggacgggagtgtattcatcacaggaggccagcagcgcgcggttccactggaagatagcacacccgtatttactccagagatctacgttcccgaacaagatactttttacaagcaaaacccgaatagtatcgttcgtgcctatcattcgatcagcttgttgctgccggacggacgtgttttcaatggtggcggtggcttatgcggcgattgtgagacgaaccactttgatgcgcaaatctttacgccgaattatctttacgatagcaacgggaacttagccactcgccctaaaatcacccgtacctcaacccagtcagtcaaggtcggcgggtggatcaccatttggactgacatgtcgatctcggccgcaagtttaattcgctacggaactgctactcacacggtgaacaccgatcagcgacgcatcggcttgacgttaacgaacaacggaggtaattcgtacagctttcaagttccgtcggacagcggggttgctcttccgggatactggatgttgttcgttatgaattccgctggtgtaccctccgttgcgtcgacgattaatgttacccagggccaaactggccaccatcaccatcaccattag

SEQ ID NO: 250 - protein, 650 aa, Artificial Sequence
  Engineered variant of Galactose Oxidase from Fusarium graminearum
MASAPIGVAIPRNNWAVTCDSAQSGNECIKAIDGNKDTFWHTQYGVNGDPKPPHTITIDMKTVQNVNGLSVLPRQDGNQNGWIGRHEVYLSSDGVNWGSPVASGSWFADSTTKYSNFETRPARYVRLVAITEANGQPWTSIAEINVFQASSYTAPQPELGRWGPTIDLPIVPSAAAIEPTSGRVLMWSSYRNDAFRDSPGGITLTSSWDPSTGIVSDRTSEVTGHDMFCPGISMDGNGQIVVSGGNDAKKTSLYDSSSDSWIPGPDMQVARGYQSSATMSDGRVFTIGGSFSGGQVEKNGEVYSPSSKTWTSLPNAKVNPMLTADKRGLYRSDNHAWLFGWKKGSVFQAGPSTAMNWYYTSGSGDVKSAGKRQSDRGVAPDAMCGNAVMYDAVKGKILTFGGSPDYEDSDATTNAHIITLGEPGTSPNTVFASNGLNFARTFHTSVVLPDGSVFITGGQQRAVPLEDSTPVFTPEIYVPEQDTFYKQNPNSIVRAYHSISLLLPDGRVFNGGGGLCGDCETNHFDAQIFTPNYLYDSNGNLATRPKITRTSTQSVKVGGWITIWTDMSISAASLIRYGTATHTVNTDQRRIGLTLTNNGGNSYSFQVPSDSGVALPGYWMLFVMNSAGVPSVASTINVTQGQTGHHHHHH

SEQ ID NO: 251 - DNA, 1953 bp, Artificial Sequence
  Engineered variant of Galactose Oxidase from Fusarium graminearum
atggcatcagcaccgatcggggtagccatcccgcgcaacaactgggccgttacatgcgattccgcccagagtgggaatgaatgcattaaggcaattgacggtaataaagacacgttttggcacactcaatatggtgtgaacggagatcccaaaccgccgcacaccatcacgatcgatatgaaaacagtacaaaacgtgaatggcctttctgtactgccacgtcaggatggcaatcagaatggatggatcggacgtcacgaggtgtatttaagttctgatggggtgaattggggatcgcctgtagcgtctgggtcctggtttgccgattccaccacaaagtactctaattttgagacacgtccggcccgttacgtgcgccttgtcgccattaccgaagccaatgggcaaccgtggacttcaattgccgagattaacgtatttcaggcgtctagttacactgccccgcagccggagttggggcgctggggcccgacaatcgatcttcccattgtgccatcggccgccgcaatcgagccaacgagcggtcgtgtcttgatgtggagctcttatcgtaacgatgcgtttcgtgactctcctggcggtattacactgacgagctcatgggaccctagcactggaattgtatccgatcgcactagtagtgttaccgggcacgacatgttttgccccggtatctcgatggacgggaacggtcagatcgtggtcagcggtggtaatgatgcaaagaaaacttccttatatgattcgagctcggactcttggattccgggcccggatatgcaggtcgcgcgtgggtatcaatcaagtgcgactatgagtgatgggcgcgtatttacgattggcggcagttttagtggcggtcaagttgagaagaacggggaggtttactccccgagctcgaagacttggacttcgctgccgaatgcaaaagttaaccccatgctgaccgccgataaacggggtctgtaccgtagcgataatcatgcttggctgtttgggtggaaaaagggtagcgtcttccaagcaggtccaagtactgccatgaactggtattatacatctgggtcgggggacgttaagagtgcagggaagcgtcaatcagaccgcggagtagccccagacgccatgtgcggtaatgccgtaatgtacgacgcagtcaaaggcaaaattttgactttcgggggctcgcccgattatgaggactcagatgcgactacaaatgcccatattatcacgctgggcgagcctggcacgagtccgaatacggtatttgcgagtaatgggttaaatttcgctcgtacctttcatacctcggtggtccttccggacgggagtgtattcatcacaggaggccagcagcgcgcggttccactggaagatagcacacccgtatttactccagagatctacgttcccgaacaagatactttttacaagcaaaacccgaatagtatcgttcgtgcctatcattcgatcagcttgttgctgccggacggacgtgttttcaatggtggcggtggcttatgcggcgattgtgagacgaaccactttgatgcgcaaatctttacgccgaattatctttacgatagcaacgggaacttagccactcgccctaaaatcacccgtacctcaacccagtcagtcaaggtcggcgggtggatcaccatttggactgacatgtcgatctcggccgcaagtttaattcgctacggaactgctactcacacggtgaacaccgatcagcgacgcatcggcttgacgttaacgaacaacggaggtaattcgtacagctttcaagttccgtcggacagcggggttgctcttccgggatactggatgttgttcgttatgaattccgctggtgtaccctccgttgcgtcgacgattaatgttacccagggccaaactggccaccatcaccatcaccattag

SEQ ID NO: 252 - protein, 650 aa, Artificial Sequence
  Engineered variant of Galactose Oxidase from Fusarium graminearum
MASAPIGVAIPRNNWAVTCDSAQSGNECIKAIDGNKDTFWHTQYGVNGDPKPPHTITIDMKTVQNVNGLSVLPRQDGNQNGWIGRHEVYLSSDGVNWGSPVASGSWFADSTTKYSNFETRPARYVRLVAITEANGQPWTSIAEINVFQASSYTAPQPELGRWGPTIDLPIVPSAAAIEPTSGRVLMWSSYRNDAFRDSPGGITLTSSWDPSTGIVSDRTSSVTGHDMFCPGISMDGNGQIVVSGGNDAKKTSLYDSSSDSWIPGPDMQVARGYQSSATMSDGRVFTIGGSFSGGQVEKNGEVYSPSSKTWTSLPNAKVNPMLTADKRGLYRSDNHAWLFGWKKGSVFQAGPSTAMNWYYTSGSGDVKSAGKRQSDRGVAPDAMCGNAVMYDAVKGKILTFGGSPDYEDSDATTNAHIITLGEPGTSPNTVFASNGLNFARTFHTSVVLPDGSVFITGGQQRAVPLEDSTPVFTPEIYVPEQDTFYKQNPNSIVRAYHSISLLLPDGRVFNGGGGLCGDCETNHFDAQIFTPNYLYDSNGNLATRPKITRTSTQSVKVGGWITIWTDMSISAASLIRYGTATHTVNTDQRRIGLTLTNNGGNSYSFQVPSDSGVALPGYWMLFVMNSAGVPSVASTINVTQGQTGHHHHHH

SEQ ID NO: 253 - DNA, 1953 bp, Artificial Sequence
  Engineered variant of Galactose Oxidase from Fusarium graminearum
atggcatcagcaccgatcggggtagccatcccgcgcaacaactgggccgttacatgcgattccgcccagagtgggaatgaatgcattaaggcaattgacggtaataaagacacgttttggcacactcaatatggtgtgaacggagatcccaaaccgccgcacaccatcacgatcgatatgaaaacagtacaaaacgtgaatggcctttctgtactgccacgtcaggatggcaatcagaatggatggatcggacgtcacgaggtgtatttaagttctgatggggtgaattggggatcgcctgtagcgtctgggtcctggtttgccgattccaccacaaagtactctaattttgagacacgtccggcccgttacgtgcgccttgtcgccattaccgaagccaatgggcaaccgtggacttcaattgccgagattaacgtatttcaggcgtctagttacactgccccgcagccggagttggggcgctggggcccgacaatcgatcttcccattgtgccatcggccgccgcaatcgagccaacgagcggtcgtgtcttgatgtggagctcttatcgtaacgatgcgtttcgtgactctcctggcggtattacactgacgagctcatgggaccctagcactggaattgtatccgatcgcactagtaccgttaccgggcacgacatgttttgccccggtatctcgatggacgggaacggtcagatcgtggtcagcggtggtaatgatgcaaagaaaacttccttatatgattcgagctcggactcttggattccgggcccggatatgcaggtcgcgcgtgggtatcaatcaagtgcgactatgagtgatgggcgcgtatttacgattggcggcagttttagtggcggtcaagttgagaagaacggggaggtttactccccgagctcgaagacttggacttcgctgccgaatgcaaaagttaaccccatgctgaccgccgataaacggggtctgtaccgtagcgataatcatgcttggctgtttgggtggaaaaagggtagcgtcttccaagcaggtccaagtactgccatgaactggtattatacatctgggtcgggggacgttaagagtgcagggaagcgtcaatcagaccgcggagtagccccagacgccatgtgcggtaatgccgtaatgtacgacgcagtcaaaggcaaaattttgactttcgggggctcgcccgattatgaggactcagatgcgactacaaatgcccatattatcacgctgggcgagcctggcacgagtccgaatacggtatttgcgagtaatgggttaaatttcgctcgtacctttcatacctcggtggtccttccggacgggagtgtattcatcacaggaggccagcagcgcgcggttccactggaagatagcacacccgtatttactccagagatctacgttcccgaacaagatactttttacaagcaaaacccgaatagtatcgttcgtgcctatcattcgatcagcttgttgctgccggacggacgtgttttcaatggtggcggtggcttatgcggcgattgtgagacgaaccactttgatgcgcaaatctttacgccgaattatctttacgatagcaacgggaacttagccactcgccctaaaatcacccgtacctcaacccagtcagtcaaggtcggcgggtggatcaccatttggactgacatgtcgatccgggccgcaagtttaattcgctacggaactgctactcacacggtgaacaccgatcagcgacgcatcggcttgacgttaacgaacaacggaggtaattcgtacagctttcaagttccgtcggacagcggggttgctcttccgggatactggatgttgttcgttatgaattccgctggtgtaccctccgttgcgtcgacgattaatgttacccagggccaaactggccaccatcaccatcaccattag

SEQ ID NO: 254 - protein, 650 aa, Artificial Sequence
  Engineered variant of Galactose Oxidase from Fusarium graminearum
MASAPIGVAIPRNNWAVTCDSAQSGNECIKAIDGNKDTFWHTQYGVNGDPKPPHTITIDMKTVQNVNGLSVLPRQDGNQNGWIGRHEVYLSSDGVNWGSPVASGSWFADSTTKYSNFETRPARYVRLVAITEANGQPWTSIAEINVFQASSYTAPQPELGRWGPTIDLPIVPSAAAIEPTSGRVLMWSSYRNDAFRDSPGGITLTSSWDPSTGIVSDRTSTVTGHDMFCPGISMDGNGQIVVSGGNDAKKTSLYDSSSDSWIPGPDMQVARGYQSSATMSDGRVFTIGGSFSGGQVEKNGEVYSPSSKTWTSLPNAKVNPMLTADKRGLYRSDNHAWLFGWKKGSVFQAGPSTAMNWYYTSGSGDVKSAGKRQSDRGVAPDAMCGNAVMYDAVKGKILTFGGSPDYEDSDATTNAHIITLGEPGTSPNTVFASNGLNFARTFHTSVVLPDGSVFITGGQQRAVPLEDSTPVFTPEIYVPEQDTFYKQNPNSIVRAYHSISLLLPDGRVFNGGGGLCGDCETNHFDAQIFTPNYLYDSNGNLATRPKITRTSTQSVKVGGWITIWTDMSIRAASLIRYGTATHTVNTDQRRIGLTLTNNGGNSYSFQVPSDSGVALPGYWMLFVMNSAGVPSVASTINVTQGQTGHHHHHH

SEQ ID NO: 255 - DNA, 1953 bp, Artificial Sequence
  Engineered variant of Galactose Oxidase from Fusarium graminearum
atggcatcagcaccgatcggggtagccatcccgcgcaacaactgggccgttacatgcgattccgcccagagtgggaatgaatgcattaaggcaattgacggtaataaagacacgttttggcacactcaatatggtgtgaacggagatcccaaaccgccgcacaccatcacgatcgatatgaaaacagtacaaaacgtgaatggcctttctgtactgccacgtcaggatggcaatcagaatggatggatcggacgtcacgaggtgtatttaagttctgatggggtgaattggggatcgcctgtagcgtctgggtcctggtttgccgattccaccacaaagtactctaattttgagacacgtccggcccgttacgtgcgccttgtcgccattaccgaagccaatgggcaaccgtggacttcaattgccgagattaacgtatttcaggcgtctagttacactgccccgcagccggagttggggcgctggggcccgacaatcgatcttcccattgtgccatcggccgccgcaatcgagccaacgagcggtcgtgtcttgatgtggagctcttatcgtaacgatgcgtttcgtgactctcctggcggtattacactgacgagctcatgggaccctagcactggaattgtatccgatcgcactagtaccgttaccgggcacgacatgttttgccccggtatctcgatggacgggaacggtcagatcgtggtcagcggtggtaatgatgcaaagaaaacttccttatatgattcgagctcggactcttggattccgggcccggatatgcaggtcgcgcgtgggtatcaatcaagtgcgactatgagtgatgggcgcgtatttacgattggcggcagttttagtggcggtcaagttgagaagaacggggaggtttactccccgagctcgaagacttggacttcgctgccgaatgcaaaagttaaccccatgctgaccgccgataaacggggtctgtaccgtagcgataatcatgcttggctgtttgggtggaaaaagggtagcgtcttccaagcaggtccaagtactgccatgaactggtattatacatctgggtcgggggacgttaagagtgcagggaagcgtcaatcagaccgcggagtagccccagacgccatgtgcggtaatgccgtaatgtacgacgcagtcaaaggcaaaattttgactttcgggggctcgcccgattatgaggactcagatgcgactacaaatgcccatattatcacgctgggcgagcctggcacgagtccgaatacggtatttgcgagtaatgggttaaatttcgctcgtacctttcatacctcggtggtccttccggacgggagtgtattcatcacaggaggccagcagcgcgcggttccactggaagatagcacacccgtatttactccagagatctacgttcccgaacaagatactttttacaagcaaaacccgaatagtatcgttcgtgcctatcattcgatcagcttgttgctgccggacggacgtgttttcaatggtggcggtggcttatgcggcacgtgtgagacgaaccactttgatgcgcaaatctttacgccgaattatctttacgatagcaacgggaacttagccactcgccctaaaatcacccgtacctcaacccagtcagtcaaggtcggcgggtggatcaccatttggactgacatgtcgatctcggccgcaagtttaattcgctacggaactgctactcacacggtgaacaccgatcagcgacgcatcggcttgacgttaacgaacaacggaggtaattcgtacagctttcaagttccgtcggacagcggggttgctcttccgggatactggatgttgttcgttatgaattccgctggtgtaccctccgttgcgtcgacgattaatgttacccagggccaaactggccaccatcaccatcaccattag

SEQ ID NO: 256 - protein, 650 aa, Artificial Sequence
  Engineered variant of Galactose Oxidase from Fusarium graminearum
MASAPIGVAIPRNNWAVTCDSAQSGNECIKAIDGNKDTFWHTQYGVNGDPKPPHTITIDMKTVQNVNGLSVLPRQDGNQNGWIGRHEVYLSSDGVNWGSPVASGSWFADSTTKYSNFETRPARYVRLVAITEANGQPWTSIAEINVFQASSYTAPQPELGRWGPTIDLPIVPSAAAIEPTSGRVLMWSSYRNDAFRDSPGGITLTSSWDPSTGIVSDRTSTVTGHDMFCPGISMDGNGQIVVSGGNDAKKTSLYDSSSDSWIPGPDMQVARGYQSSATMSDGRVFTIGGSFSGGQVEKNGEVYSPSSKTWTSLPNAKVNPMLTADKRGLYRSDNHAWLFGWKKGSVFQAGPSTAMNWYYTSGSGDVKSAGKRQSDRGVAPDAMCGNAVMYDAVKGKILTFGGSPDYEDSDATTNAHIITLGEPGTSPNTVFASNGLNFARTFHTSVVLPDGSVFITGGQQRAVPLEDSTPVFTPEIYVPEQDTFYKQNPNSIVRAYHSISLLLPDGRVFNGGGGLCGTCETNHFDAQIFTPNYLYDSNGNLATRPKITRTSTQSVKVGGWITIWTDMSISAASLIRYGTATHTVNTDQRRIGLTLTNNGGNSYSFQVPSDSGVALPGYWMLFVMNSAGVPSVASTINVTQGQTGHHHHHH

SEQ ID NO: 257 - DNA, 1953 bp, Artificial Sequence
  Engineered variant of Galactose Oxidase from Fusarium graminearum
atggcatcagcaccgatcggggtagccatcccgcgcaacaactgggccgttacatgcgattccgcccagagtgggaatgaatgcattaaggcaattgacggtaataaagacacgttttggcacactcaatatggtgtgaacggagatcccaaaccgccgcacaccatcacgatcgatatgaaaacagtacaaaacgtgaatggcctttctgtactgccacgtcaggatggcaatcagaatggatggatcggacgtcacgaggtgtatttaagttctgatggggtgaattggggatcgcctgtagcgtctgggtcctggtttgccgattccaccacaaagtactctaattttgagacacgtccggcccgttacgtgcgccttgtcgccattaccgaagccaatgggcaaccgtggacttcaattgccgagattaacgtatttcaggcgtctagttacactgccccgcagccggagttggggcgctggggcccgacaatcgatcttcccattgtgccatcggccgccgcaatcgagccaacgagcggtcgtgtcttgatgtggagctcttatcgtaacgatgcgtttcgtgactctcctggcggtattacactgacgagctcatgggaccctagcactggaattgtatccgatcgcactagtaccgttaccgggcacgacatgttttgccccggtatctcgatggacgggaacggtcagatcgtggtcagcggtggtaatgatgcaaagaaaacttccttatatgattcgagctcggactcttggattccgggcccggatatgcaggtcgcgcgtgggtatcaatcaagtgcgactatgagtgatgggcgcgtatttacgattggcggcagttttagtggcggtcaagttgagaagaacggggaggtttactccccgagctcgaagacttggacttcgctgccgaatgcaaaagttaaccccatgctgaccgccgataaacggggtctgtaccgtagcgataatcatgcttggctgtttgggtggaaaaagggtagcgtcttccaagcaggtccaagtactgccatgaactggtattatacatctgggtcgggggacgttaagagtgcagggaagcgtcaatcagaccgcggagtagccccagacgccatgtgcggtaatgccgtaatgtacgacgcagtcaaaggcaaaattttgactttcgggggctcgcccgattatgaggactcagatgcgactacaaatgcccatattatcacgctgggcgagcctggcacgagtccgaatacggtatttgcgagtaatgggttaaatttcgctcgtacctttcatacctcggtggtccttccggacgggagtgtattcatcacaggaggccagcagcgcgcggttccactggaagatagcacacccgtatttactccagagatctacgttcccgaacaagatactttttacaagcaaaacccgaatagtatcgttcgtgcctatcattcgatcagcttgttgctgccggacggacgtgttttcaatggtggcggtggcttatgcggcgattgtgagacgaaccactttgatgcgcaaatctttacgccgaattatctttacgatagcaacgggaacttagccactcgccctaaaatcacccgtacctcaaccagttcagtcaaggtcggcgggtggatcaccatttggactgacatgtcgatctcggccgcaagtttaattcgctacggaactgctactcacacggtgaacaccgatcagcgacgcatcggcttgacgttaacgaacaacggaggtaattcgtacagctttcaagttccgtcggacagcggggttgctcttccgggatactggatgttgttcgttatgaattccgctggtgtaccctccgttgcgtcgacgattaatgttacccagggccaaactggccaccatcaccatcaccattag

SEQ ID NO: 258 - protein, 650 aa, Artificial Sequence
  Engineered variant of Galactose Oxidase from Fusarium graminearum
MASAPIGVAIPRNNWAVTCDSAQSGNECIKAIDGNKDTFWHTQYGVNGDPKPPHTITIDMKTVQNVNGLSVLPRQDGNQNGWIGRHEVYLSSDGVNWGSPVASGSWFADSTTKYSNFETRPARYVRLVAITEANGQPWTSIAEINVFQASSYTAPQPELGRWGPTIDLPIVPSAAAIEPTSGRVLMWSSYRNDAFRDSPGGITLTSSWDPSTGIVSDRTSTVTGHDMFCPGISMDGNGQIVVSGGNDAKKTSLYDSSSDSWIPGPDMQVARGYQSSATMSDGRVFTIGGSFSGGQVEKNGEVYSPSSKTWTSLPNAKVNPMLTADKRGLYRSDNHAWLFGWKKGSVFQAGPSTAMNWYYTSGSGDVKSAGKRQSDRGVAPDAMCGNAVMYDAVKGKILTFGGSPDYEDSDATTNAHIITLGEPGTSPNTVFASNGLNFARTFHTSVVLPDGSVFITGGQQRAVPLEDSTPVFTPEIYVPEQDTFYKQNPNSIVRAYHSISLLLPDGRVFNGGGGLCGDCETNHFDAQIFTPNYLYDSNGNLATRPKITRTSTSSVKVGGWITIWTDMSISAASLIRYGTATHTVNTDQRRIGLTLTNNGGNSYSFQVPSDSGVALPGYWMLFVMNSAGVPSVASTINVTQGQTGHHHHHH

SEQ ID NO: 259 - DNA, 1953 bp, Artificial Sequence
  Engineered variant of Galactose Oxidase from Fusarium graminearum
atggcatcagcaccgatcggggtagccatcccgcgcaacaactgggccgttacatgcgattccgcccagagtgggaatgaatgcattaaggcaattgacggtaataaagacacgttttggcacactcaatatggtgtgaacggagatcccaaaccgccgcacaccatcacgatcgatatgaaaacagtacaaaacgtgaatggcctttctgtactgccacgtcaggatggcaatcagaatggatggatcggacgtcacgaggtgtatttaagttctgatggggtgaattggggatcgcctgtagcgtctgggtcctggtttgccgattccaccacaaagtactctaattttgagacacgtccggcccgttacgtgcgccttgtcgccattaccgaagccaatgggcaaccgtggacttcaattgccgagattaacgtatttcaggcgtctagttacactgccccgcagccggagttggggcgctggggcccgacaatcgatcttcccattgtgccatcggccgccgcaatcgagccaacgagcggtcgtgtcttgatgtggagctcttatcgtaacgatgcgtttcgtgactctcctggcggtattacactgacgagctcatgggaccctagcactggaattgtatccgatcgcactagtaccgttaccgggcacgacatgttttgccccggtatctcgatggacgggaacggtcagatcgtggtcagcggtggtaatgatgcaaagaaaacttccttatatgattcgagctcggactcttggattgagggcccggatatgcaggtcgcgcgtgggtatcaatcaagtgcgactatgagtgatgggcgcgtatttacgattggcggcagttttagtggcggtcaagttgagaagaacggggaggtttactccccgagctcgaagacttggacttcgctgccgaatgcaaaagttaaccccatgctgaccgccgataaacggggtctgtaccgtagcgataatcatgcttggctgtttgggtggaaaaagggtagcgtcttccaagcaggtccaagtactgccatgaactggtattatacatctgggtcgggggacgttaagagtgcagggaagcgtcaatcagaccgcggagtagccccagacgccatgtgcggtaatgccgtaatgtacgacgcagtcaaaggcaaaattttgactttcgggggctcgcccgattatgaggactcagatgcgactacaaatgcccatattatcacgctgggcgagcctggcacgagtccgaatacggtatttgcgagtaatgggttaaatttcgctcgtacctttcatacctcggtggtccttccggacgggagtgtattcatcacaggaggccagcagcgcgcggttccactggaagatagcacacccgtatttactccagagatctacgttcccgaacaagatactttttacaagcaaaacccgaatagtatcgttcgtgcctatcattcgatcagcttgttgctgccggacggacgtgttttcaatggtggcggtggcttatgcggcgattgtgagacgaaccactttgatgcgcaaatctttacgccgaattatctttacgatagcaacgggaacttagccactcgccctaaaatcacccgtacctcaacccagtcagtcaaggtcggcgggtggatcaccatttggactgacatgtcgatctcggccgcaagtttaattcgctacggaactgctactcacacggtgaacaccgatcagcgacgcatcggcttgacgttaacgaacaacggaggtaattcgtacagctttcaagttccgtcggacagcggggttgctcttccgggatactggatgttgttcgttatgaattccgctggtgtaccctccgttgcgtcgacgattaatgttacccagggccaaactggccaccatcaccatcaccattag

SEQ ID NO: 260 - protein, 650 aa, Artificial Sequence
  Engineered variant of Galactose Oxidase from Fusarium graminearum
MASAPIGVAIPRNNWAVTCDSAQSGNECIKAIDGNKDTFWHTQYGVNGDPKPPHTITIDMKTVQNVNGLSVLPRQDGNQNGWIGRHEVYLSSDGVNWGSPVASGSWFADSTTKYSNFETRPARYVRLVAITEANGQPWTSIAEINVFQASSYTAPQPELGRWGPTIDLPIVPSAAAIEPTSGRVLMWSSYRNDAFRDSPGGITLTSSWDPSTGIVSDRTSTVTGHDMFCPGISMDGNGQIVVSGGNDAKKTSLYDSSSDSWIEGPDMQVARGYQSSATMSDGRVFTIGGSFSGGQVEKNGEVYSPSSKTWTSLPNAKVNPMLTADKRGLYRSDNHAWLFGWKKGSVFQAGPSTAMNWYYTSGSGDVKSAGKRQSDRGVAPDAMCGNAVMYDAVKGKILTFGGSPDYEDSDATTNAHIITLGEPGTSPNTVFASNGLNFARTFHTSVVLPDGSVFITGGQQRAVPLEDSTPVFTPEIYVPEQDTFYKQNPNSIVRAYHSISLLLPDGRVFNGGGGLCGDCETNHFDAQIFTPNYLYDSNGNLATRPKITRTSTQSVKVGGWITIWTDMSISAASLIRYGTATHTVNTDQRRIGLTLTNNGGNSYSFQVPSDSGVALPGYWMLFVMNSAGVPSVASTINVTQGQTGHHHHHH

SEQ ID NO: 261 - DNA, 1953 bp, Artificial Sequence
  Engineered variant of Galactose Oxidase from Fusarium graminearum
atggcatcagcaccgatcggggtagccatcccgcgcaacaactgggccgttacatgcgattccgcccaggacgggaatgaatgcattaaggcaattgacggtaataaagacacgttttggcacactcaatatggtgtgaacggagatcccaaaccgccgcacaccatcacgatcgatatgaaaacagtacaaaacgtgaatggcctttctgtactgccacgtcaggatggcaatcagaatggatggatcggacgtcacgaggtgtatttaagttctgatggggtgaattggggatcgcctgtagcgtctgggtcctggtttgccgattccaccacaaagtactctaattttgagacacgtccggcccgttacgtgcgccttgtcgccattaccgaagccaatgggcaaccgtggacttcaattgccgagattaacgtatttcaggcgtctagttacactgccccgcagccggagttggggcgctggggcccgacaatcgatcttcccattgtgccatcggccgccgcaatcgagccaacgagcggtcgtgtcttgatgtggagctcttatcgtaacgatgcgtttcgtgactctcctggcggtattacactgacgagctcatgggaccctagcactggaattgtatccgatcgcactagtaccgttaccgggcacgacatgttttgccccggtatctcgatggacgggaacggtcagatcgtggtcagcggtggtaatgatgcaaaggttacttccttatatgattcgagctcggactcttggattccgggcccggatatgcaggtcgcgcgtgggtatcaatcaagtgcgactatgagtgatgggcgcgtatttacgattggcggcagttttagtggcggtcaagctgagaagaacggggaggtttactccccgagctcgaaaacgtggacttcgctgccgaatgcaaaagttaaccccatgctgaccgccgataaacggggtctgtaccgtagcgataatcatgcttggctgtttgggtggaaaaagggtagcgtcttccaagcaggtccaagtactgccatgaactggtattatacatctgggtcgggggacgttaagagtgcagggaagcgtcaatcagaccgcggagtagccccagacgcgatgtgcggtaatgccgtaatgtacgacgcagtcaaaggcaaaattttgactttcgggggctcgcccgattatgaggagtcagatgcgactacaaatgcccatattatcacgctgggcgagcctggcacgagtccgaatacggtatttgcgagtaatgggttaaatttcgctcgtacctttcatacctcggtggtccttccggacgggagtgtattcatcacaggaggccagcagcgcgcggttccactggaagatagcacacccgtatttactccagagatctacgttcccgaacaagatactttttacaagcaaaacccgaatagtatcgttcgtgcctatcattcgatcagcttgttgctgccggacggacgtgttttcaatggtggcggtggcttatgcggcgattgtgagacgaaccactttgatgcgcaaatctttacgccgaattatctttacgatagcaacgggaacttagccactcgccctaaaatcacccgtacctcaacccagtcagtcaaggtcggcgggtggatcaccatttggactgacatgcaaatcaccgccgcaagtttaattcgctacggaactgctactcacacggtgaacaccgatcagcgacgcatcggcttgacgttaacgaacaacggaggtaattcgtacagctttcaagttccgtcggacagcggggttgctcttccgggatactggatgttgttcgttatgaattccgctggtgtaccctccgttgcgtcgacgattaatgttacccagggccaaactggccaccatcaccatcaccattag

SEQ ID NO: 262 - protein, 650 aa, Artificial Sequence
  Engineered variant of Galactose Oxidase from Fusarium graminearum
MASAPIGVAIPRNNWAVTCDSAQDGNECIKAIDGNKDTFWHTQYGVNGDPKPPHTITIDMKTVQNVNGLSVLPRQDGNQNGWIGRHEVYLSSDGVNWGSPVASGSWFADSTTKYSNFETRPARYVRLVAITEANGQPWTSIAEINVFQASSYTAPQPELGRWGPTIDLPIVPSAAAIEPTSGRVLMWSSYRNDAFRDSPGGITLTSSWDPSTGIVSDRTSTVTGHDMFCPGISMDGNGQIVVSGGNDAKVTSLYDSSSDSWIPGPDMQVARGYQSSATMSDGRVFTIGGSFSGGQAEKNGEVYSPSSKTWTSLPNAKVNPMLTADKRGLYRSDNHAWLFGWKKGSVFQAGPSTAMNWYYTSGSGDVKSAGKRQSDRGVAPDAMCGNAVMYDAVKGKILTFGGSPDYEESDATTNAHIITLGEPGTSPNTVFASNGLNFARTFHTSVVLPDGSVFITGGQQRAVPLEDSTPVFTPEIYVPEQDTFYKQNPNSIVRAYHSISLLLPDGRVFNGGGGLCGDCETNHFDAQIFTPNYLYDSNGNLATRPKITRTSTQSVKVGGWITIWTDMQITAASLIRYGTATHTVNTDQRRIGLTLTNNGGNSYSFQVPSDSGVALPGYWMLFVMNSAGVPSVASTINVTQGQTGHHHHHH

SEQ ID NO: 263 - DNA, 1953 bp, Artificial Sequence
  Engineered variant of Galactose Oxidase from Fusarium graminearum
atggcatcagcaccgatcggggtagccatcccgcgcaacaactgggccgttacatgcgattccgcccagagtgggaatgaatgcattaaggcaattgacggtaataaagacacgttttggcacactcaatatggtgtgaacggagatcccaaaccgccgcacaccatcacgatcgatatgaaaacagtacaaaacgtgaatggcatttctgtactgccacgtcaggatggcaatcagaatggatggatcggacgtcacgaggtgtatttaagttctgatggggtgaattggggatcgcctgtagcgtctgggtcctggtttgccgattccaccacaaagtactctaattttgagacacgtccggcccgttacgtgcgccttgtcgccattaccgaagccaatgggcaaccgtggacttcaattgccgagattaacgtatttcaggcgtctagttacactgccccgcagccggagttggggcgctggggcccgacaatcgatcttcccattgtgccatcggccgccgcaatcgagccaacgagcggtcgtgtcttgatgtggagctcttatcgtaacgatgcgtttcgtgactctcctggcggtattacactgacgagctcatgggaccctagcactggaattgtatccgatcgcactagtaccgttaccgggcacgacatgttttgccccggtatctcgatggacgggaacggtcagatcgtggtcagcggtggtaatgatgcaaagaaaacttccttatatgattcgagctcggactcttggattccgggcccggatatgcaggtcgcgcgtgggtatcaatcaagtgcgactatgagtgatgggcgcgtatttacgattggcggcagttttagtggcggtcaagctgagaagaacggggaggtttactccccgagctcgaagacttggacttcgctgccgaatgcaaaagttaaccccatgctgaccgccgataaacggggtctgtaccgtagcgataatcatgcttggctgtttgggtggaaaaagggtagcgtcttccaagcaggtccaagtactgccatgaactggtattatacatctgggtcgggggacgttaagagtgcagggaagcgtcaatcagaccgcggagtagccccagacgccatgtgcggtaatgccgtaatgtacgacgcagtcaaaggcaaaattttgactttcgggggctcgcccgattatgaggactcagatgcgactacaaatgcccatattatcacgctgggcgagcctggcacgagtccgaatacggtatttgcgagtaatgggttaaatttcgctcgtacctttcatacctcggtggtccttccggacgggagtgtattcatcacaggaggccagcagcgcgcggttccactggaagatagcacacccgtatttactccagagatctacgttcccgaacaagatactttttacaagcaaaacccgaatagtatcgttcgtgcctatcattcgatcagcttgttgctgccggacggacgtgttttcaatggtggcggtggcttatgcggcgattgtgagacgaaccactttgatgcgcaaatctttacgccgaattatctttacgatagcaacgggaacttagccactcgccctaaaatcacccgtacctcaacccagtcagtcaaggtcggcgggtggatcaccatttggactgacatgtcgatctcggccgcaagtttaattcgctacggaactgctactcacacggtgaacaccgatcagcgacgcatcggcttgacgttaacgaacaacggaggtaattcgtacagctttcaagttccgtcggacagcggggttgctcttccgggatactggatgttgttcgttatgaattccgctggtgtaccctccgttgcgtcgacgattaatgttacccagggccaaactggccaccatcaccatcaccattag

SEQ ID NO: 264 - protein, 650 aa, Artificial Sequence
  Engineered variant of Galactose Oxidase from Fusarium graminearum
MASAPIGVAIPRNNWAVTCDSAQSGNECIKAIDGNKDTFWHTQYGVNGDPKPPHTITIDMKTVQNVNGISVLPRQDGNQNGWIGRHEVYLSSDGVNWGSPVASGSWFADSTTKYSNFETRPARYVRLVAITEANGQPWTSIAEINVFQASSYTAPQPELGRWGPTIDLPIVPSAAAIEPTSGRVLMWSSYRNDAFRDSPGGITLTSSWDPSTGIVSDRTSTVTGHDMFCPGISMDGNGQIVVSGGNDAKKTSLYDSSSDSWIPGPDMQVARGYQSSATMSDGRVFTIGGSFSGGQAEKNGEVYSPSSKTWTSLPNAKVNPMLTADKRGLYRSDNHAWLFGWKKGSVFQAGPSTAMNWYYTSGSGDVKSAGKRQSDRGVAPDAMCGNAVMYDAVKGKILTFGGSPDYEDSDATTNAHIITLGEPGTSPNTVFASNGLNFARTFHTSVVLPDGSVFITGGQQRAVPLEDSTPVFTPEIYVPEQDTFYKQNPNSIVRAYHSISLLLPDGRVFNGGGGLCGDCETNHFDAQIFTPNYLYDSNGNLATRPKITRTSTQSVKVGGWITIWTDMSISAASLIRYGTATHTVNTDQRRIGLTLTNNGGNSYSFQVPSDSGVALPGYWMLFVMNSAGVPSVASTINVTQGQTGHHHHHH

SEQ ID NO: 265 - DNA, 1953 bp, Artificial Sequence
  Engineered variant of Galactose Oxidase from Fusarium graminearum
atggcatcagcaccgatcggggtagccatcccgcgcaacaactgggccgttacatgcgattccgcccaggacgggaatgaatgcattaaggcaattgacggtaataaagacacgttttggcacactcaatatggtgtgaacggagatcccaaaccgccgcacaccatcacgatcgatatgaaaacagtacaaaacgtgaatggcctttctgtactgccacgtcaggatggcaatcagaatggatggatcggacgtcacgaggtgtatttaagttctgatggggtgaattggggatcgcctgtagcgtctgggtcctggtttgccgattccaccacaaagtactctaattttgagacacgtccggcccgttacgtgcgccttgtcgccattaccgaagccaatgggcaaccgtggacttcaattgccgagattaacgtatttcaggcgtctagttacactgccccgcagccggagttggggcgctggggcccgacaatcgatcttcccattgtgccatcggccgccgcaatcgagccaacgagcggtcgtgtcttgatgtggagctcttatcgtaacgatgcgtttcgtgactctcctggcggtattacactgacgagctcatgggaccctagcactggaattgtatccgatcgcactagtaccgttaccgggcacgacatgttttgccccggtatctcgatggacgggaacggtcagatcgtggtcagcggtggtaatgatgcaaagaaaacttccttatatgattcgagctcggactcttggattccgggcccggatatgcaggtcgcgcgtgggtatcaatcaagtgcgactatgagtgatgggcgcgtatttacgattggcggcagttttagtggcggtcaagctgagaagaacggggaggtttactccccgagctcgaagacttggacttcgctgccgaatgcaaaagttaaccccatgctgaccgccgataaacggggtctgtaccgtagcgataatcatgcttggctgtttgggtggaaaaagggtagcgtcttccaagcaggtccaagtactgccatgaactggtattatacatctgggtcgggggacgttctgagtgcagggaagcgtcaatcagaccgcggagtagccccagacgcgatgtgcggtaatgccgtaatgtacgacgcagtcaaaggcaaaattttgactttcgggggctcgcccgattatgaggagtcagatgcgactacaaatgcccatattatcacgctgggcgagcctggcacgagtccgaatacggtatttgcgagtaatgggttaaatttcgctcgtacctttcatacctcggtggtccttccggacgggagtgtattcatcacaggaggccagcagcgcgcggttccactggaagatagcacacccgtatttactccagagatctacgttcccgaacaagatactttttacaagcaaaacccgaatagtatcgttcgtgcctatcattcgatcagcttgttgctgccggacggacgtgttttcaatggtggcggtggcttatgcggcgattgtgagacgaaccactttgatgcgcaaatctttacgccgaattatctttacgatagcaacgggaacttagccactcgccctaaaatcacccgtacctcaacccagtcagtcaaggtcggcgggtggatcaccatttggactgacatgtcgatctcggccgcaagtttaattcgctacggaactgctactcacacggtgaacaccgatcagcgacgcatcggcttgacgttagtaaacaacggaggtaattcgtacagctttcaagttccgtcggacagcggggttgctcttccgggatactggatgttgttcgttatgaattccgctggtgtaccctccgttgcgtcgacgattaatgttacccagggccaaactggccaccatcaccatcaccattag

SEQ ID NO: 266 - protein, 650 aa, Artificial Sequence
  Engineered variant of Galactose Oxidase from Fusarium graminearum
MASAPIGVAIPRNNWAVTCDSAQDGNECIKAIDGNKDTFWHTQYGVNGDPKPPHTITIDMKTVQNVNGLSVLPRQDGNQNGWIGRHEVYLSSDGVNWGSPVASGSWFADSTTKYSNFETRPARYVRLVAITEANGQPWTSIAEINVFQASSYTAPQPELGRWGPTIDLPIVPSAAAIEPTSGRVLMWSSYRNDAFRDSPGGITLTSSWDPSTGIVSDRTSTVTGHDMFCPGISMDGNGQIVVSGGNDAKKTSLYDSSSDSWIPGPDMQVARGYQSSATMSDGRVFTIGGSFSGGQAEKNGEVYSPSSKTWTSLPNAKVNPMLTADKRGLYRSDNHAWLFGWKKGSVFQAGPSTAMNWYYTSGSGDVLSAGKRQSDRGVAPDAMCGNAVMYDAVKGKILTFGGSPDYEESDATTNAHIITLGEPGTSPNTVFASNGLNFARTFHTSVVLPDGSVFITGGQQRAVPLEDSTPVFTPEIYVPEQDTFYKQNPNSIVRAYHSISLLLPDGRVFNGGGGLCGDCETNHFDAQIFTPNYLYDSNGNLATRPKITRTSTQSVKVGGWITIWTDMSISAASLIRYGTATHTVNTDQRRIGLTLVNNGGNSYSFQVPSDSGVALPGYWMLFVMNSAGVPSVASTINVTQGQTGHHHHHH

SEQ ID NO: 267 - DNA, 1953 bp, Artificial Sequence
  Engineered variant of Galactose Oxidase from Fusarium graminearum
atggcatcagcaccgatcggggtagccatcccgcgcaacaactgggccgttacatgcgattccgcccagagtgggaatgaatgcattaaggcaattgacggtaataaagacacgttttggcacactcaatatggtgtgaacggagatcccaaaccgccgcacaccatcacgatcgatatgaaaacagtacaaaacgtgaatggcctttctgtactgccacgtcaggatggcaatcaaaatggatggatcggacgtcacgaggtgtatttaagttctgatggggtgaattggggatcgcctgtagcgtctgggtcctggtttgccgattccaccacaaagtactctaattttgagacacgtccggcccgttacgtgcgccttgtcgccattaccgaagccaatgggcaaccgtggacttcaattgccgagattaacgtatttcaggcgtctagttacactgccccgcagccggagttggggcgctggggcccgacaatcgatcttcccattgtgccatcggccgccgcaatcgagccaacgagcggtcgtgtcttgatgtggagctcttatcgtaacgatgcgtttcgtgactctcctggcggtattacactgacgagctcatgggaccctagcactggaattgtatccgatcgcactagtaccgttaccgggcacgacatgttttgccccggtatctcgatggacgggaacggtcagatcgtggtcagcggtggtaatgatgcaaaggttacttccttatatgattcgagctcggactcttggattccgggcccggatatgcaggtcgcgcgtgggtatcaatcaagtgcgactatgagtgatgggcgcgtatttacgattggcggcagttttagtggcggtcaagctgagaagaacggggaggtttactccccgagctcgaagacttggacttcgctgccgaatgcaaaagttaaccccatgctgaccgccgataaacggggtctgtaccgtagcgataatcatgcttggctgtttgggtggaaaaagggtagcgtcttccaagcaggtccaagtactgccatgaactggtattatacatctgggtcgggggacgttaagagtgcagggaagcgtcaatcagaccgcggagtagccccagacgccatgtgcggtaatgccgtaatgtacgacgcagtcaaaggcaaaattttgactttcgggggctcgcccgattatgaggactcagatgcgactacaaatgcccatattatcacgctgggcgagcctggcacgagtccgaatacggtatttgcgagtaatgggttaaatttcgctcgtacctttcatacctcggtggtccttccggacgggagtgtattcatcacaggaggccagcagcgcgcggttccactggaagatagcacacccgtatttactccagagatctacgttcccgaacaagatactttttacaagcaaaacccgaatagtatcgttcgtgcctatcattcgatcagcttgttgctgccggacggacgtgttttcaatggtggcggtggcttatgcggcgattgtgagacgaaccactttgatgcgcaaatctttacgccgaattatctttacgatagcaacgggaacttagccactcgccctaaaatcacccgtacctcaacccagtcagtcaaggtcggcgggtggatcaccatttggactgacatgtcgatcaccgccgcaagtttaattcgctacggaactgctactcacacggtgaacaccgatcagcgacgcatcggcttgacgttaacgaacaacggaggtaattcgtacagctttcaagttccgtcggacagcggggttgctcttccgggatactggatgttgttcgttatgaattccgctggtgtaccctccgttgcgtcgacgattaatgttacccagggccaaactggccaccatcaccatcaccattag

SEQ ID NO: 268 - protein, 650 aa, Artificial Sequence
  Engineered variant of Galactose Oxidase from Fusarium graminearum
MASAPIGVAIPRNNWAVTCDSAQSGNECIKAIDGNKDTFWHTQYGVNGDPKPPHTITIDMKTVQNVNGLSVLPRQDGNQNGWIGRHEVYLSSDGVNWGSPVASGSWFADSTTKYSNFETRPARYVRLVAITEANGQPWTSIAEINVFQASSYTAPQPELGRWGPTIDLPIVPSAAAIEPTSGRVLMWSSYRNDAFRDSPGGITLTSSWDPSTGIVSDRTSTVTGHDMFCPGISMDGNGQIVVSGGNDAKVTSLYDSSSDSWIPGPDMQVARGYQSSATMSDGRVFTIGGSFSGGQAEKNGEVYSPSSKTWTSLPNAKVNPMLTADKRGLYRSDNHAWLFGWKKGSVFQAGPSTAMNWYYTSGSGDVKSAGKRQSDRGVAPDAMCGNAVMYDAVKGKILTFGGSPDYEDSDATTNAHIITLGEPGTSPNTVFASNGLNFARTFHTSVVLPDGSVFITGGQQRAVPLEDSTPVFTPEIYVPEQDTFYKQNPNSIVRAYHSISLLLPDGRVFNGGGGLCGDCETNHFDAQIFTPNYLYDSNGNLATRPKITRTSTQSVKVGGWITIWTDMSITAASLIRYGTATHTVNTDQRRIGLTLTNNGGNSYSFQVPSDSGVALPGYWMLFVMNSAGVPSVASTINVTQGQTGHHHHHH

SEQ ID NO: 269 - DNA, 1953 bp, Artificial Sequence
  Engineered variant of Galactose Oxidase from Fusarium graminearum
atggcatcagcaccgatcggggtagccatcccgcgcaacaactgggccgttacatgcgattccgcccaggacgggaatgaatgcattaaggcaattgacggtaataaagacacgttttggcacactcaatatggtgtgaacggagatcccaaaccgccgcacaccatcacgatcgatatgaaaacagtacaaaacgtgaatggcctttctgtactgccacgtcaggatggcaatcaaaatggatggatcggacgtcacgaggtgtatttaagttctgatggggtgaattggggatcgcctgtagcgtctgggtcctggtttgccgattccaccacaaagtactctaattttgagacacgtccggcccgttacgtgcgccttgtcgccattaccgaagccaatgggcaaccgtggacttcaattgccgagattaacgtatttcaggcgtctagttacactgccccgcagccggagttggggcgctggggcccgacaatcgatcttcccattgtgccatcggccgccgcaatcgagccaacgagcggtcgtgtcttgatgtggagctcttatcgtaacgatgcgtttcgtgactctcctggcggtattacactgacgagctcatgggaccctagcactggaattgtatccgatcgcactagtaccgttaccgggcacgacatgttttgccccggtatctcgatggacgggaacggtcagatcgtggtcagcggtggtaatgatgcaaagaaaacttccttatatgattcgagctcggactcttggattccgggcccggatatgcaggtcgcgcgtgggtatcaatcaagtgcgactatgagtgatgggcgcgtatttacgattggcggcagttttagtggcggtcaagctgagaagaacggggaggtttactccccgagctcgaaaatgtggacttcgctgccgaatgcaaaagttaaccccatgctgaccgccgataaacggggtctgtaccgtagcgataatcatgcttggctgtttgggtggaaaaagggtagcgtcttccaagcaggtccaagtactgccatgaactggtattatacatctgggtcgggggacgttaagagtgcagggaagcgtcaatcagaccgcggagtagccccagacgccatgtgcggtaatgccgtaatgtacgacgcagtcaaaggcaaaattttgactttcgggggctcgcccgattatgaggagtcagatgcgactacaaatgcccatattatcacgctgggcgagcctggcacgagtccgaatacggtatttgcgagtaatgggttaaatttcgctcgtacctttcatacctcggtggtccttccggacgggagtgtattcatcacaggaggccagcagcgcgcggttccactggaagatagcacacccgtatttactccagagatctacgttcccgaacaagatactttttacaagcaaaacccgaatagtatcgttcgtgcctatcattcgatcagcttgttgctgccggacggacgtgttttcaatggtggcggtggcttatgcggcgattgtgagacgaaccactttgatgcgcaaatctttacgccgaattatctttacgatagcaacgggaacttagccactcgccctaaaatcacccgtacctcaacccagtcagtcaaggtcggcgggtggatcaccatttggactgacatgtcgatcaccgccgcaagtttaattcgctacggaactgctactcacacggtgaacaccgatcagcgacgcatcggcttgacgttaacgaacaacggaggtaattcgtacagctttcaagttccgtcggacagcggggttgctcttccgggatactggatgttgttcgttatgaattccgctggtgtaccctccgttgcgtcgacgattaatgttacccagggccaaactggccaccatcaccatcaccattag

SEQ ID NO: 270 - protein, 650 aa, Artificial Sequence
  Engineered variant of Galactose Oxidase from Fusarium graminearum
MASAPIGVAIPRNNWAVTCDSAQDGNECIKAIDGNKDTFWHTQYGVNGDPKPPHTITIDMKTVQNVNGLSVLPRQDGNQNGWIGRHEVYLSSDGVNWGSPVASGSWFADSTTKYSNFETRPARYVRLVAITEANGQPWTSIAEINVFQASSYTAPQPELGRWGPTIDLPIVPSAAAIEPTSGRVLMWSSYRNDAFRDSPGGITLTSSWDPSTGIVSDRTSTVTGHDMFCPGISMDGNGQIVVSGGNDAKKTSLYDSSSDSWIPGPDMQVARGYQSSATMSDGRVFTIGGSFSGGQAEKNGEVYSPSSKMWTSLPNAKVNPMLTADKRGLYRSDNHAWLFGWKKGSVFQAGPSTAMNWYYTSGSGDVKSAGKRQSDRGVAPDAMCGNAVMYDAVKGKILTFGGSPDYEESDATTNAHIITLGEPGTSPNTVFASNGLNFARTFHTSVVLPDGSVFITGGQQRAVPLEDSTPVFTPEIYVPEQDTFYKQNPNSIVRAYHSISLLLPDGRVFNGGGGLCGDCETNHFDAQIFTPNYLYDSNGNLATRPKITRTSTQSVKVGGWITIWTDMSITAASLIRYGTATHTVNTDQRRIGLTLTNNGGNSYSFQVPSDSGVALPGYWMLFVMNSAGVPSVASTINVTQGQTGHHHHHH

SEQ ID NO: 271 - DNA, 1953 bp, Artificial Sequence
  Engineered variant of Galactose Oxidase from Fusarium graminearum
atggcatcagcaccgatcggggtagccatcccgcgcaacaactgggccgttacatgcgattccgcccaggacgggaatgaatgcattaaggcaattgacggtaataaagacacgttttggcacactcaatatggtgtggggggagatcccaaaccgccgcacaccatcacgatcgatatgaaaacagtacaaaacgtgaatggcctttctgtactgccacgtcaggatggcaatcagaatggatggatcggacgtcacgaggtgtatttaagttctgatggggtgaattggggatcgcctgtagcgtctgggtcctggtttgccgattccaccacaaagtactctaattttgagacacgtccggcccgttacgtgcgccttgtcgccattaccgaagccaatgggcaaccgtggacttcaattgccgagattaacgtatttcaggcgtctagttacactgccccgcagccggagttggggcgctggggcccgacaatcgatcttcccattgtgccatcggccgccgcaatcgagccaacgagcggtcgtgtcttgatgtggagctcttatcgtaacgatgcgtttcgtgactctcctggcggtattacactgacgagctcatgggaccctagcactggaattgtatccgatcgcactagtaccgttaccgggcacgacatgttttgccccggtatctcgatggacgggaacggtcagatcgtggtcagcggtggtaatgatgcaaagaaaacttccttatatgattcgagctcggactcttggattccgggcccggatatgcaggtcgcgcgtgggtatcaatcaagtgcgactatgagtgatgggcgcgtatttacgattggcggcagttttagtggcggtcaagctgagaagaacggggaggtttactccccgagctcgaagacttggacttcgctgccgaatgcaaaagttaaccccatgctgaccgccgataaacggggtctgtaccgtagcgataatcatgcttggctgtttgggtggaaaaagggtagcgtcttccaagcaggtccaagtactgccatgaactggtattatacatctgggtcgggggacgttaagagtgcagggaagcgtcaatcagaccgcggagtagccccagactcgatgtgcggtaatgccgtaatgtacgacgcagtcaaaggcaaaattttgactttcgggggctcgcccgattatgaggagtcagatgcgactacaaatgcccatattatcacgctgggcgagcctggcacgagtccgaatacggtatttgcgagtaatgggttaaatttcgctcgtacctttcatacctcggtggtccttccggacgggagtgtattcatcacaggaggccagcagcgcgcggttccactggaagatagcacacccgtatttactccagagatctacgttcccgaacaagatactttttacaagcaaaacccgaatagtatcgttcgtgcctatcattcgatcagcttgttgctgccggacggacgtgttttcaatggtggcggtggcttatgcggcgattgtgagacgaaccactttgatgcgcaaatctttacgccgaattatctttacgatagcaacgggaacttagccactcgccctaaaatcacccgtacctcaacccagtcagtcaaggtcggcgggtggatcaccatttggactgacatgtcgatcaccgccgcaagtttaattcgctacggaactgctactcacacggtgaacaccgatcagcgacgcatcggcttgacgttaacgaacaacggaggtaattcgtacagctttcaagttccgtcggacagcggggttgctcttccgggatactggatgttgttcgttatgaattccgctggtgtaccctccgttgcgtcgacgattaatgttacccagggccaaactggccaccatcaccatcaccattag

SEQ ID NO: 272 - protein, 650 aa, Artificial Sequence
  Engineered variant of Galactose Oxidase from Fusarium graminearum
MASAPIGVAIPRNNWAVTCDSAQDGNECIKAIDGNKDTFWHTQYGVGGDPKPPHTITIDMKTVQNVNGLSVLPRQDGNQNGWIGRHEVYLSSDGVNWGSPVASGSWFADSTTKYSNFETRPARYVRLVAITEANGQPWTSIAEINVFQASSYTAPQPELGRWGPTIDLPIVPSAAAIEPTSGRVLMWSSYRNDAFRDSPGGITLTSSWDPSTGIVSDRTSTVTGHDMFCPGISMDGNGQIVVSGGNDAKKTSLYDSSSDSWIPGPDMQVARGYQSSATMSDGRVFTIGGSFSGGQAEKNGEVYSPSSKTWTSLPNAKVNPMLTADKRGLYRSDNHAWLFGWKKGSVFQAGPSTAMNWYYTSGSGDVKSAGKRQSDRGVAPDSMCGNAVMYDAVKGKILTFGGSPDYEESDATTNAHIITLGEPGTSPNTVFASNGLNFARTFHTSVVLPDGSVFITGGQQRAVPLEDSTPVFTPEIYVPEQDTFYKQNPNSIVRAYHSISLLLPDGRVFNGGGGLCGDCETNHFDAQIFTPNYLYDSNGNLATRPKITRTSTQSVKVGGWITIWTDMSITAASLIRYGTATHTVNTDQRRIGLTLTNNGGNSYSFQVPSDSGVALPGYWMLFVMNSAGVPSVASTINVTQGQTGHHHHHH

SEQ ID NO: 273 - DNA, 1953 bp, Artificial Sequence
  Engineered variant of Galactose Oxidase from Fusarium graminearum
atggcatcagcaccgatcggggtagccatcccgcgcaacaactgggccgttacatgcgattccgcccaggacgggaatgaatgcattaaggcaattgacggtaataaagacacgttttggcacactcaatatggtgtgaacggagatcccaaaccgccgcacaccatcacgatcgatatgaaaacagtacaaaacgtgaatggcctttctgtactgccacgtcaggatggcaatcagaatggatggatcggacgtcacgaggtgtatttaagttctgatggggtgaattggggatcgcctgtagcgtctgggtcctggtttgccgattccaccacaaagtactctaattttgagacacgtccggcccgttacgtgcgccttgtcgccattaccgaagccaatgggcaaccgtggacttcaattgccgagattaacgtatttcaggcgtctagttacactgccccgcagccggagttggggcgctggggcccgacaatcgatcttcccattgtgccatcggccgccgcaatcgagccaacgagcggtcgtgtcttgatgtggagctcttatcgtaacgatgcgtttcgtgactctcctggcggtattacactgacgagctcatgggaccctagcactggaattgtatccgatcgcactagtaccgttaccgggcacgacatgttttgccccggtatctcgatggacgggaacggtcagatcgtggtcagcggtggtaatgatgcaaagaaaacttccttatatgattcgagctcggactcttggattccgggcccggatatgcaggtcgcgcgtgggtatcaatcaagtgcgactatgagtgatgggcgcgtatttacgattggcggcagttttagtggcggtcaagctgagaagaacggggaggtttactccccgagctcgaaaacgtggacttcgctgccgaatgcaaaagttaaccccatgctgaccgccgataaacggggtctgtaccgtagcgataatcatgcttggctgtttgggtggaaaaagggtagcgtcttccaagcaggtccaagtactgccatgaactggtattatacatctgggtcgggggacgttaagagtgcagggaagcgtcaatcagaccgcggagtagccccagacgcgatgtgcggtaatgccgtaatgtacgacgcagtcaaaggcaaaattttgactttcgggggctcgcccgattatgaggactcagatgcgactacaaatgcccatattatcacgctgggcgagcctggcacgagtccgaatacggtatttgcgagtaatgggttaaatttcgctcgtacctttcatacctcggtggtccttccggacgggagtgtattcatcacaggaggccagcagcgcgcggttccactggaagatagcacacccgtatttactccagagatctacgttcccgaacaagatactttttacaagcaaaacccgaatagtatcgttcgtgcctatcattcgatcagcttgttgctgccggacggacgtgttttcaatggtggcggtggcttatgcggcgattgtgagacgaaccactttgatgcgcaaatctttacgccgaattatctttacgatagcaacgggaacttagccactcgccctaaaatcacccgtacctcaacccagtcagtcaaggtcggcgggtggatcaccatttggactgacatgtcgatcagcgccgcaagtttaattcgctacggaactgctactcacacggtgaacaccgatcagcgacgcatcggcttgacgttagtaaacaacggaggtaattcgtacagctttcaagttccgtcggacagcggggttgctcttccgggatactggatgttgttcgttatgaattccgctggtgtaccctccgttgcgtcgacgattaatgttacccagggccaaactggccaccatcaccatcaccattag

SEQ ID NO: 274 - protein, 650 aa, Artificial Sequence
  Engineered variant of Galactose Oxidase from Fusarium graminearum
MASAPIGVAIPRNNWAVTCDSAQDGNECIKAIDGNKDTFWHTQYGVNGDPKPPHTITIDMKTVQNVNGLSVLPRQDGNQNGWIGRHEVYLSSDGVNWGSPVASGSWFADSTTKYSNFETRPARYVRLVAITEANGQPWTSIAEINVFQASSYTAPQPELGRWGPTIDLPIVPSAAAIEPTSGRVLMWSSYRNDAFRDSPGGITLTSSWDPSTGIVSDRTSTVTGHDMFCPGISMDGNGQIVVSGGNDAKKTSLYDSSSDSWIPGPDMQVARGYQSSATMSDGRVFTIGGSFSGGQAEKNGEVYSPSSKTWTSLPNAKVNPMLTADKRGLYRSDNHAWLFGWKKGSVFQAGPSTAMNWYYTSGSGDVKSAGKRQSDRGVAPDAMCGNAVMYDAVKGKILTFGGSPDYEDSDATTNAHIITLGEPGTSPNTVFASNGLNFARTFHTSVVLPDGSVFITGGQQRAVPLEDSTPVFTPEIYVPEQDTFYKQNPNSIVRAYHSISLLLPDGRVFNGGGGLCGDCETNHFDAQIFTPNYLYDSNGNLATRPKITRTSTQSVKVGGWITIWTDMSISAASLIRYGTATHTVNTDQRRIGLTLVNNGGNSYSFQVPSDSGVALPGYWMLFVMNSAGVPSVASTINVTQGQTGHHHHHH

SEQ ID NO: 275 - DNA, 1953 bp, Artificial Sequence
  Engineered variant of Galactose Oxidase from Fusarium graminearum
atggcatcagcaccgatcggggtagccatcccgcgcaacaactgggccgttacatgcgattccgcccaggacgggaatgaatgcattaaggcaattgacggtaataaagacacgttttggcacactcaatatggtgtgaacggagatcccaaaccgccgcacaccatcacgatcgatatgaaaacagtacaaaacgtgaatggcctttctgtactgccacgtcaggatggcaatactaatggatggatcggacgtcacgaggtgtatttaagttctgatggggtgaattggggatcgcctgtagcgtctgggtcctggtttgccgattccaccacaaagtactctaattttgagacacgtccggcccgttacgtgcgccttgtcgccattaccgaagccaatgggcaaccgtggacttcaattgccgagattaacgtatttcaggcgtctagttacactgccccgcagccggagttggggcgctggggcccgacaatcgatcttcccattgtgccatcggccgccgcaatcgagccaacgagcggtcgtgtcttgatgtggagctcttatcgtaacgatgcgtttcgtgactctcctggcggtattacactgacgagctcatgggaccctagcactggaattgtatccgatcgcactagtaccgttaccgggcacgacatgttttgccccggtatctcgatggacgggaacggtcagatcgtggtcagcggtggtaatgatgcaaagaaaacttccttatatgattcgagctcggactcttggattccgggcccggatatgcaggtcgcgcgtgggtatcaatcaagtgcgactatgagtgatgggcgcgtatttacgattggcggcagttttagtggcggtcaagctgagaagaacggggaggtttactccccgagctcggggacgtggacttcgctgccgaatgcaaaagttaaccccatgctgaccgccgataaacggggtctgtaccgtagcgataatcatgcttggctgtttgggtggaaaaagggtagcgtcttccaagcaggtccaagtactgccatgaactggtattatacatctgggtcgggggacgttctgagtgcagggaagcgtcaatcagaccgcggagtagccccagacgccatgtgcggtaatgccgtaatgtacgacgcagtcaaaggcaaaattttgactttcgggggctcgcccgattatgaggactcagatgcgactacaaatgcccatattatcacgctgggcgagcctggcacgagtccgaatacggtatttgcgagtaatgggttaaatttcgctcgtacctttcatacctcggtggtccttccggacgggagtgtattcatcacaggaggccagcagcgcgcggttccactggaagatagcacacccgtatttactccagagatctacgttcccgaacaagatactttttacaagcaaaacccgaatagtatcgttcgtgcctatcattcgatcagcttgttgctgccggacggacgtgttttcaatggtggcggtggcttatgcggcgattgtgagacgaaccactttgatgcgcaaatctttacgccgaattatctttacgatagcaacgggaacttagccactcgccctaaaatcacccgtacctcaacccagtcagtcaaggtcggcgggtggatcaccatttggactgacatgtcgatctcggccgcaagtttaattcgctacggaactgctactcacacggtgaacaccgatcagcgacgcatcggcttgacgttaacgaacaacggaggtaattcgtacagctttcaagttccgtcggacagcggggttgctcttccgggatactggatgttgttcgttatgaattccgctggtgtaccctccgttgcgtcgacgattaatgttacccagggccaaactggccaccatcaccatcaccattag

SEQ ID NO: 276 - protein, 650 aa, Artificial Sequence
  Engineered variant of Galactose Oxidase from Fusarium graminearum
MASAPIGVAIPRNNWAVTCDSAQDGNECIKAIDGNKDTFWHTQYGVNGDPKPPHTITIDMKTVQNVNGLSVLPRQDGNTNGWIGRHEVYLSSDGVNWGSPVASGSWFADSTTKYSNFETRPARYVRLVAITEANGQPWTSIAEINVFQASSYTAPQPELGRWGPTIDLPIVPSAAAIEPTSGRVLMWSSYRNDAFRDSPGGITLTSSWDPSTGIVSDRTSTVTGHDMFCPGISMDGNGQIVVSGGNDAKKTSLYDSSSDSWIPGPDMQVARGYQSSATMSDGRVFTIGGSFSGGQAEKNGEVYSPSSGTWTSLPNAKVNPMLTADKRGLYRSDNHAWLFGWKKGSVFQAGPSTAMNWYYTSGSGDVLSAGKRQSDRGVAPDAMCGNAVMYDAVKGKILTFGGSPDYEDSDATTNAHIITLGEPGTSPNTVFASNGLNFARTFHTSVVLPDGSVFITGGQQRAVPLEDSTPVFTPEIYVPEQDTFYKQNPNSIVRAYHSISLLLPDGRVFNGGGGLCGDCETNHFDAQIFTPNYLYDSNGNLATRPKITRTSTQSVKVGGWITIWTDMSISAASLIRYGTATHTVNTDQRRIGLTLTNNGGNSYSFQVPSDSGVALPGYWMLFVMNSAGVPSVASTINVTQGQTGHHHHHH

SEQ ID NO: 277 - DNA, 1953 bp, Artificial Sequence
  Engineered variant of Galactose Oxidase from Fusarium graminearum
atggcatcagcaccgatcggggtagccatcccgcgcaacaactgggccgttacatgcgattccgcccagagtgggaatgaatgcattaaggcaattgacggtaataaagacacgttttggcacactcaatatggtgtgaacggagatcccaaaccgccgcacaccatcacgatcgatatgaaaacagtacaaaacgtgaatggcctttctgtactgccacgtcaggatggcaatcagaatggatggatcggacgtcacgaggtgtatttaagttctgatggggtgaattggggatcgcctgtagcgtctgggtcctggtttgccgattccaccacaaagtactctaattttgagacacgtccggcccgttacgtgcgccttgtcgccattaccgaagccaatgggcaaccgtggacttcaattgccgagattaacgtatttcaggcgtctagttacactgccccgcagccggagttggggcgctggggcccgacaatcgatcttcccattgtgccatcggccgccgcaatcgagccaacgagcggtcgtgtcttgatgtggagctcttatcgtaacgatgcgtttcgtgactctcctggcggtattacactgacgagctcatgggaccctagcactggaattgtatccgatcgcactagtaccgttaccgggcacgacatgttttgccccggtatctcgatggacgggaacggtcagatcgtggtcagcggtggtaatgatgcaaagaaaacttccttatatgattcgagctcggactcttggattccgggcccggatatgcaggtcgcgcgtgggtatcaatcaagtgcgactatgagtgatgggcgcgtatttacgattggcggcagttttagtggcggtcaagctgagaagaacggggaggtttactccccgagctcgaagacttggacttcgctgccgaatgcaaaagttaaccccatgctgaccgccgataaacggggtctgtaccgtagcgataatcatgcttggctgtttgggtggaaaaagggtagcgtcttccaagcaggtccaagtactgccatgaactggtattatacatctgggtcgggggacgttaagagtgcagggaagcgtcaatcagaccgcggagtagccccagacgcgatgtgcggtaatgccgtaatgtacgacgcagtcaaaggcaaaattttgactttcgggggctcgcccgattatgaggactcagatgcgactacaaatgcccatattatcacgctgggcgagcctggcacgagtccgaatacggtatttgcgagtaatgggttaaatttcgctcgtacctttcatacctcggtggtccttccggacgggagtgtattcatcacaggaggccagcagcgcgcggttccactggaagatagcacacccgtatttactccagagatctacgttcccgaacaagatactttttacaagcaaaacccgaatagtatcgttcgtgcctatcattcgatcagcttgttgctgccggacggacgtgttttcaatggtggcggtggcttatgcggcgattgtgagacgaaccactttgatgcgcaaatctttacgccgaattatctttacgatagcaacgggaacttagccactcgccctaaaatcacccgtacctcaacccagtcagtcaaggtcggcgggtggatcaccatttggactgacatgtcgatcaccgccgcaagtttaattcgctacggaactgctactcacacggtgaacaccgatcagcgacgcatcggcttgacgttaacgaacaacggaggtaattcgtacagctttcaagttccgtcggacagcggggttgctcttccgggatactggatgttgttcgttatgaattccgctggtgtaccctccgttgcgtcgacgattaatgttacccagggccaaactggccaccatcaccatcaccattag

SEQ ID NO: 278 - protein, 650 aa, Artificial Sequence
  Engineered variant of Galactose Oxidase from Fusarium graminearum
MASAPIGVAIPRNNWAVTCDSAQSGNECIKAIDGNKDTFWHTQYGVNGDPKPPHTITIDMKTVQNVNGLSVLPRQDGNQNGWIGRHEVYLSSDGVNWGSPVASGSWFADSTTKYSNFETRPARYVRLVAITEANGQPWTSIAEINVFQASSYTAPQPELGRWGPTIDLPIVPSAAAIEPTSGRVLMWSSYRNDAFRDSPGGITLTSSWDPSTGIVSDRTSTVTGHDMFCPGISMDGNGQIVVSGGNDAKKTSLYDSSSDSWIPGPDMQVARGYQSSATMSDGRVFTIGGSFSGGQAEKNGEVYSPSSKTWTSLPNAKVNPMLTADKRGLYRSDNHAWLFGWKKGSVFQAGPSTAMNWYYTSGSGDVKSAGKRQSDRGVAPDAMCGNAVMYDAVKGKILTFGGSPDYEDSDATTNAHIITLGEPGTSPNTVFASNGLNFARTFHTSVVLPDGSVFITGGQQRAVPLEDSTPVFTPEIYVPEQDTFYKQNPNSIVRAYHSISLLLPDGRVFNGGGGLCGDCETNHFDAQIFTPNYLYDSNGNLATRPKITRTSTQSVKVGGWITIWTDMSITAASLIRYGTATHTVNTDQRRIGLTLTNNGGNSYSFQVPSDSGVALPGYWMLFVMNSAGVPSVASTINVTQGQTGHHHHHH

SEQ ID NO: 279 - DNA, 1953 bp, Artificial Sequence
  Engineered variant of Galactose Oxidase from Fusarium graminearum
atggcatcagcaccgatcggggtagccatcccgcgcaacaactgggccgttacatgcgattccgcccaggacgggaatgaatgcattaaggcaattgacggtaataaagacacgttttggcacactcaatatggtgtgaacggagatcccaaaccgccgcacaccatcacgatcgatatgaaaacagtacaaaacgtgaatggcctttctgtactgccacgtcaggatggcaatcaaaatggatggatcggacgtcacgaggtgtatttaagttctgatggggtgaattggggatcgcctgtagcgtctgggtcctggtttgccgattccaccacaaagtactctaattttgagacacgtccggcccgttacgtgcgccttgtcgccattaccgaagccaatgggcaaccgtggacttcaattgccgagattaacgtatttcaggcgtctagttacactgccccgcagccggagttggggcgctggggcccgacaatcgatcttcccattgtgccatcggccgccgcaatcgagccaacgagcggtcgtgtcttgatgtggagctcttatcgtaacgatgcgtttcgtgactctcctggcggtattacactgacgagctcatgggaccctagcactggaattgtatccgatcgcactagtaccgttaccgggcacgacatgttttgccccggtatctcgatggacgggaacggtcagatcgtggtcagcggtggtaatgatgcaaagaaaacttccttatatgattcgagctcggactcttggattccgggcccggatatgcaggtcgcgcgtgggtatcaatcaagtgcgactatgagtgatgggcgcgtatttacgattggcggcagttttagtggcggtcaagctgagaagaacggggaggtttactccccgagctcgaagacttggacttcgctgccgaatgcaaaagttaaccccatgctgaccgccgataaacggggtctgtaccgtagcgataatcatgcttggctgtttgggtggaaaaagggtagcgtcttccaagcaggtccaagtactgccatgaactggtattatacatctgggtcgggggacgttaagagtgcagggaagcgtcaatcagaccgcggagtagccccagacgccatgtgcggtaatgccgtaatgtacgacgcagtcaaaggcaaaattttgactttcgggggctcgcccgattatgaggactcagatgcgactacaaatgcccatattatcacgctgggcgagcctggcacgagtccgaatacggtatttgcgagtaatgggttaaatttcgctcgtacctttcatacctcggtggtccttccggacgggagtgtattcatcacaggaggccagcagcgcgcggttccactggaagatagcacacccgtatttactccagagatctacgttcccgaacaagatactttttacaagcaaaacccgaatagtatcgttcgtgcctatcattcgatcagcttgttgctgccggacggacgtgttttcaatggtggcggtggcttatgcggcgattgtgagacgaaccactttgatgcgcaaatctttacgccgaattatctttacgatagcaacgggaacttagccactcgccctaaaatcacccgtacctcaacccagtcagtcaaggtcggcgggtggatcaccatttggactgacatgtcgatcagcgccgcaagtttaattcgctacggaactgctactcacacggtgaacaccgatcagcgacgcatcggcttgacgttagtaaacaacggaggtaattcgtacagctttcaagttccgtcggacagcggggttgctcttccgggatactggatgttgttcgttatgaattccgctggtgtaccctccgttgcgtcgacgattaatgttacccagggccaaactggccaccatcaccatcaccattag

SEQ ID NO: 280 - protein, 650 aa, Artificial Sequence; identical to SEQ ID NO: 274
  Engineered variant of Galactose Oxidase from Fusarium graminearum

SEQ ID NO: 281 - DNA, 1953 bp, Artificial Sequence
  Engineered variant of Galactose Oxidase from Fusarium graminearum
atggcatcagcaccgatcggggtagccatcccgcgcaacaactgggccgttacatgcgattccgcccaggacgggaatgaatgcattaaggcaattgacggtaataaagacacgttttggcacactcaatatggtgtgaacggagatcccaaaccgccgcacaccatcacgatcgatatgaaaacagtacaaaacgtgaatggcctttctgtactgccacgtcaggatggcaatcagaatggatggatcggacgtcacgaggtgtatttaagttctgatggggtgaattggggatcgcctgtagcgtctgggtcctggtttgccgattccaccacaaagtactctaattttgagacacgtccggcccgttacgtgcgccttgtcgccattaccgaagccaatgggcaaccgtggacttcaattgccgagattaacgtatttcaggcgtctagttacactgccccgcagccggagttggggcgctggggcccgacaatcgatcttcccattgtgccatcggccgccgcaatcgagccaacgagcggtcgtgtcttgatgtggagctcttatcgtaacgatgcgtttcgtgactctcctggcggtattacactgacgagctcatgggaccctagcactggaattgtatccgatcgcactagtaccgttaccgggcacgacatgttttgccccggtatctcgatggacgggaacggtcagatcgtggtcagcggtggtaatgatgcaaagaaaacttccttatatgattcgagctcggactcttggattccgggcccggatatgcaggtcgcgcgtgggtatcaatcaagtgcgactatgagtgatgggcgcgtatttacgattggcggcagttttagtggcggtcaagctgagaagaacggggaggtttactccccgagctcggggatgtggacttcgctgccgaatgcaaaagttaaccccatgctgaccgccgataaacggggtctgtaccgtagcgataatcatgcttggctgtttgggtggaaaaagggtagcgtcttccaagcaggtccaagtactgccatgaactggtattatacatctgggtcgggggacgttaagagtgcagggaagcgtcaatcagaccgcggagtagccccagacgccatgtgcggtaatgccgtaatgtacgacgcagtcaaaggcaaaattttgactttcgggggctcgcccgattatgaggactcagatgcgactacaaatgcccatattatcacgctgggcgagcctggcacgagtccgaatacggtatttgcgagtaatgggttaaatttcgctcgtacctttcatacctcggtggtccttccggacgggagtgtattcatcacaggaggccagcagcgcgcggttccactggaagatagcacacccgtatttactccagagatctacgttcccgaacaagatactttttacaagcaaaacccgaatagtatcgttcgtgcctatcattcgatcagcttgttgctgccggacggacgtgttttcaatggtggcggtggcttatgcggcgattgtgagacgaaccactttgatgcgcaaatctttacgccgaattatctttacgatagcaacgggaacttagccactcgccctaaaatcacccgtacctcaacccagtcagtcaaggtcggcgggtggatcaccatttggactgacatgtcgatcagcgccgcaagtttaattcgctacggaactgctactcacacggtgaacaccgatcagcgacgcatcggcttgacgttaacgaacaacggaggtaattcgtacagctttcaagttccgtcggacagcggggttgctcttccgggatactggatgttgttcgttatgaattccgctggtgtaccctccgttgcgtcgacgattaatgttacccagggccaaactggccaccatcaccatcaccattag

SEQ ID NO: 282 - protein, 650 aa, Artificial Sequence
  Engineered variant of Galactose Oxidase from Fusarium graminearum
MASAPIGVAIPRNNWAVTCDSAQDGNECIKAIDGNKDTFWHTQYGVNGDPKPPHTITIDMKTVQNVNGLSVLPRQDGNQNGWIGRHEVYLSSDGVNWGSPVASGSWFADSTTKYSNFETRPARYVRLVAITEANGQPWTSIAEINVFQASSYTAPQPELGRWGPTIDLPIVPSAAAIEPTSGRVLMWSSYRNDAFRDSPGGITLTSSWDPSTGIVSDRTSTVTGHDMFCPGISMDGNGQIVVSGGNDAKKTSLYDSSSDSWIPGPDMQVARGYQSSATMSDGRVFTIGGSFSGGQAEKNGEVYSPSSGMWTSLPNAKVNPMLTADKRGLYRSDNHAWLFGWKKGSVFQAGPSTAMNWYYTSGSGDVKSAGKRQSDRGVAPDAMCGNAVMYDAVKGKILTFGGSPDYEDSDATTNAHIITLGEPGTSPNTVFASNGLNFARTFHTSVVLPDGSVFITGGQQRAVPLEDSTPVFTPEIYVPEQDTFYKQNPNSIVRAYHSISLLLPDGRVFNGGGGLCGDCETNHFDAQIFTPNYLYDSNGNLATRPKITRTSTQSVKVGGWITIWTDMSISAASLIRYGTATHTVNTDQRRIGLTLTNNGGNSYSFQVPSDSGVALPGYWMLFVMNSAGVPSVASTINVTQGQTGHHHHHH

SEQ ID NO: 283 - DNA, 1953 bp, Artificial Sequence
  Engineered variant of Galactose Oxidase from Fusarium graminearum
atggcatcagcaccgatcggggtagccatcccgcgcaacaactgggccgttacatgcgattccgcccagagtgggaatgaatgcattaaggcaattgacggtaataaagacacgttttggcacactcaatatggtgtgaacggagatcccaaaccgccgcacaccatcacgatcgatatgaaaacagtacaaaacgtgaatggcctttctgtactgccacgtcaggatggcaatcagaatggatggatcggacgtcacgaggtgtatttaagttctgatggggtgaattggggatcgcctgtagcgtctgggtcctggtttgccgattccaccacaaagtactctaattttgagacacgtccggcccgttacgtgcgccttgtcgccattaccgaagccaatgggcaaccgtggacttcaattgccgagattaacgtatttcaggcgtctagttacactgccccgcagccggagttggggcgctggggcccgacaatcgatcttcccattgtgccatcggccgccgcaatcgagccaacgagcggtcgtgtcttgatgtggagctcttatcgtaacgatgcgtttcgtgactctcctggcggtattacactgacgagctcatgggaccctagcactggaattgtatccgatcgcactagtaccgttaccgggcacgacatgttttgccccggtatctcgatggacgggaacggtcagatcgtggtcagcggtggtaatgatgcaaaggttacttccttatatgattcgagctcggactcttggattccgggcccggatatgcaggtcgcgcgtgggtatcaatcaagtgcgactatgagtgatgggcgcgtatttacgattggcggcagttttagtggcggtcaagctgagaagaacggggaggtttactccccgagctcgaaaacgtggacttcgctgccgaatgcaaaagttaaccccatgctgaccgccgataaacggggtctgtaccgtagcgataatcatgcttggctgtttgggtggaaaaagggtagcgtcttccaagcaggtccaagtactgccatgaactggtattatacatctgggtcgggggacgttaagagtgcagggaagcgtcaatcagaccgcggagtagccccagacgccatgtgcggtaatgccgtaatgtacgacgcagtcaaaggcaaaattttgactttcgggggctcgcccgattatgaggactcagatgcgactacaaatgcccatattatcacgctgggcgagcctggcacgagtccgaatacggtatttgcgagtaatgggttaaatttcgctcgtacctttcatacctcggtggtccttccggacgggagtgtattcatcacaggaggccagcagcgcgcggttccactggaagatagcacacccgtatttactccagagatctacgttcccgaacaagatactttttacaagcaaaacccgaatagtatcgttcgtgcctatcattcgatcagcttgttgctgccggacggacgtgttttcaatggtggcggtggcttatgcggcgattgtgagacgaaccactttgatgcgcaaatctttacgccgaattatctttacgatagcaacgggaacttagccactcgccctaaaatcacccgtacctcaacccagtcagtcaaggtcggcgggtggatcaccatttggactgacatgtcgatctcggccgcaagtttaattcgctacggaactgctactcacacggtgaacaccgatcagcgacgcatcggcttgacgttaacgaacaacggaggtaattcgtacagctttcaagttccgtcggacagcggggttgctcttccgggatactggatgttgttcgttatgaattccgctggtgtaccctccgttgcgtcgacgattaatgttacccagggccaaactggccaccatcaccatcaccattag

SEQ ID NO: 284 - protein, 650 aa, Artificial Sequence
  Engineered variant of Galactose Oxidase from Fusarium graminearum
MASAPIGVAIPRNNWAVTCDSAQSGNECIKAIDGNKDTFWHTQYGVNGDPKPPHTITIDMKTVQNVNGLSVLPRQDGNQNGWIGRHEVYLSSDGVNWGSPVASGSWFADSTTKYSNFETRPARYVRLVAITEANGQPWTSIAEINVFQASSYTAPQPELGRWGPTIDLPIVPSAAAIEPTSGRVLMWSSYRNDAFRDSPGGITLTSSWDPSTGIVSDRTSTVTGHDMFCPGISMDGNGQIVVSGGNDAKVTSLYDSSSDSWIPGPDMQVARGYQSSATMSDGRVFTIGGSFSGGQAEKNGEVYSPSSKTWTSLPNAKVNPMLTADKRGLYRSDNHAWLFGWKKGSVFQAGPSTAMNWYYTSGSGDVKSAGKRQSDRGVAPDAMCGNAVMYDAVKGKILTFGGSPDYEDSDATTNAHIITLGEPGTSPNTVFASNGLNFARTFHTSVVLPDGSVFITGGQQRAVPLEDSTPVFTPEIYVPEQDTFYKQNPNSIVRAYHSISLLLPDGRVFNGGGGLCGDCETNHFDAQIFTPNYLYDSNGNLATRPKITRTSTQSVKVGGWITIWTDMSISAASLIRYGTATHTVNTDQRRIGLTLTNNGGNSYSFQVPSDSGVALPGYWMLFVMNSAGVPSVASTINVTQGQTGHHHHHH

SEQ ID NO: 285 - DNA, 1953 bp, Artificial Sequence
  Engineered variant of Galactose Oxidase from Fusarium graminearum
atggcatcagcaccgatcggggtagccatcccgcgcaacaactgggccgttacatgcgattccgcccagagtgggaatgaatgcattaaggcaattgacggtaataaagacacgttttggcacactcaatatggtgtgaacggagatcccaaaccgccgcacaccatcacgatcgatatgaaaacagtacaaaacgtgaatggcctttctgtactgccacgtcaggatggcaatcagaatggatggatcggacgtcacgaggtgtatttaagttctgatggggtgaattggggatcgcctgtagcgtctgggtcctggtttgccgattccaccacaaagtactctaattttgagacacgtccggcccgttacgtgcgccttgtcgccattaccgaagccaatgggcaaccgtggacttcaattgccgagattaacgtatttcaggcgtctagttacactgccccgcagccggagttggggcgctggggcccgacaatcgatcttcccattgtgccatcggccgccgcaatcgagccaacgagcggtcgtgtcttgatgtggagctcttatcgtaacgatgcgtttcgtgactctcctggcggtattacactgacgagctcatgggaccctagcactggaattgtatccgatcgcactagtaccgttaccgggcacgacatgttttgccccggtatctcgatggacgggaacggtcagatcgtggtcagcggtggtaatgatgcaaagaaaacttccttatatgattcgagctcggactcttggattccgggcccggatatgcaggtcgcgcgtgggtatcaatcaagtgcgactatgagtgatgggcgcgtatttacgattggcggcagttttagtggcggtcaagctgagaagaacggggaggtttactccccgagctcgaagacttggacttcgctgccgaatgcaaaagttaaccccatgctgaccgccgataaacggggtctgtaccgtagcgataatcatgcttggctgtttgggtggaaaaagggtagcgtcttccaagcaggtccaagtactgccatgaactggtattatacatctgggtcgggggacgttaagagtgcagggaagcgtcaatcagaccgcggagtagccccagacgccatgtgcggtaatgccgtaatgtacgacgcagtcaaaggcaaaattttgactttcgggggctcgcccgattatgaggactcagatgcgactacaaatgcccatattatcacgctgggcgagcctggcacgagtccgaatacggtatttgcgagtaatgggttaaatttcgctcgtaccttttctacctcggtggtccttccggacgggagtgtattcatcacaggaggccagcagcgcgcggttccactggaagatagcacacccgtatttactccagagatctacgttcccgaacaagatactttttacaagcaaaacccgaatagtatcgttcgtgcctatcattcgatcagcttgttgctgccggacggacgtgttttcaatggtggcggtggcttatgcggcgattgtgagacgaaccactttgatgcgcaaatctttacgccgaattatctttacgatagcaacgggaacttagccactcgccctaaaatcacccgtacctcaacccagtcagtcaaggtcggcgggtggatcaccatttggactgacatgtcgatctcggccgcaagtttaattcgctacggaactgctactcacacggtgaacaccgatcagcgacgcatcggcttgacgttaacgaacaacggaggtaattcgtacagctttcaagttccgtcggacagcggggttgctcttccgggatactggatgttgttcgttatgaattccgctggtgtaccctccgttgcgtcgacgattaatgttacccagggccaaactggccaccatcaccatcaccattag

SEQ ID NO: 286 - protein, 650 aa, Artificial Sequence
  Engineered variant of Galactose Oxidase from Fusarium graminearum
MASAPIGVAIPRNNWAVTCDSAQSGNECIKAIDGNKDTFWHTQYGVNGDPKPPHTITIDMKTVQNVNGLSVLPRQDGNQNGWIGRHEVYLSSDGVNWGSPVASGSWFADSTTKYSNFETRPARYVRLVAITEANGQPWTSIAEINVFQASSYTAPQPELGRWGPTIDLPIVPSAAAIEPTSGRVLMWSSYRNDAFRDSPGGITLTSSWDPSTGIVSDRTSTVTGHDMFCPGISMDGNGQIVVSGGNDAKKTSLYDSSSDSWIPGPDMQVARGYQSSATMSDGRVFTIGGSFSGGQAEKNGEVYSPSSKTWTSLPNAKVNPMLTADKRGLYRSDNHAWLFGWKKGSVFQAGPSTAMNWYYTSGSGDVKSAGKRQSDRGVAPDAMCGNAVMYDAVKGKILTFGGSPDYEDSDATTNAHIITLGEPGTSPNTVFASNGLNFARTFSTSVVLPDGSVFITGGQQRAVPLEDSTPVFTPEIYVPEQDTFYKQNPNSIVRAYHSISLLLPDGRVFNGGGGLCGDCETNHFDAQIFTPNYLYDSNGNLATRPKITRTSTQSVKVGGWITIWTDMSISAASLIRYGTATHTVNTDQRRIGLTLTNNGGNSYSFQVPSDSGVALPGYWMLFVMNSAGVPSVASTINVTQGQTGHHHHHH

SEQ ID NO: 287 - DNA, 1953 bp, Artificial Sequence
  Engineered variant of Galactose Oxidase from Fusarium graminearum
atggcatcagcaccgatcggggtagccatcccgcgcaacaactgggccgttacatgcgattccgcccaggacgggaatgaatgcattaaggcaattgacggtaataaagacacgttttggcacactcaatatggtgtgaacggagatcccaaaccgccgcacaccatcacgatcgatatgaaaacagtacaaaacgtgaatggcctttctgtactgccacgtcaggatggcaatcagaatggatggatcggacgtcacgaggtgtatttaagttctgatggggtgaattggggatcgcctgtagcgtctgggtcctggtttgccgattccaccacaaagtactctaattttgagacacgtccggcccgttacgtgcgccttgtcgccattaccgaagccaatgggcaaccgtggacttcaattgccgagattaacgtatttcaggcgtctagttacactgccccgcagccggagttggggcgctggggcccgacaatcgatcttcccattgtgccatcggccgccgcaatcgagccaacgagcggtcgtgtcttgatgtggagctcttatcgtaacgatgcgtttcgtgactctcctggcggtattacactgacgagctcatgggaccctagcactggaattgtatccgatcgcactagtaccgttaccgggcacgacatgttttgccccggtatctcgatggacgggaacggtcagatcgtggtcagcggtggtaatgatgcaaagaaaacttccttatatgattcgagctcggactcttggattccgggcccggatatgcaggtcgcgcgtgggtatcaatcaagtgcgactatgagtgatgggcgcgtatttacgattggcggcagttttagtggcggtcaagctgagaagaacggggaggtttactccccgagctcgaagacttggacttcgctgccgaatgcaaaagttaaccccatgctgaccgccgataaacggggtctgtaccgtagcgataatcatgcttggctgtttgggtggaaaaagggtagcgtcttccaagcaggtccaagtactgccatgaactggtattatacatctgggtcgggggacgttctgagtgcagggaagcgtcaatcagaccgcggagtagccccagacgccatgtgcggtaatgccgtaatgtacgacgcagtcaaaggcaaaattttgactttcgggggctcgcccgattatgaggactcagatgcgactacaaatgcccatattatcacgctgggcgagcctggcacgagtccgaatacggtatttgcgagtaatgggttaaatttcgctcgtacctttcatacctcggtggtccttccggacgggagtgtattcatcacaggaggccagcagcgcgcggttccactggaagatagcacacccgtatttactccagagatctacgttcccgaacaagatactttttacaagcaaaacccgaatagtatcgttcgtgcctatcattcgatcagcttgttgctgccggacggacgtgttttcaatggtggcggtggcttatgcggcgattgtgagacgaaccactttgatgcgcaaatctttacgccgaattatctttacgatagcaacgggaacttagccactcgccctaaaatcacccgtacctcaacccagtcagtcaaggtcggcgggtggatcaccatttggactgacatgtcgatcaccgccgcaagtttaattcgctacggaactgctactcacacggtgaacaccgatcagcgacgcatcggcttgacgttaacgaacaacggaggtaattcgtacagctttcaagttccgtcggacagcggggttgctcttccgggatactggatgttgttcgttatgaattccgctggtgtaccctccgttgcgtcgacgattaatgttacccagggccaaactggccaccatcaccatcaccattag

SEQ ID NO: 288 - protein, 650 aa, Artificial Sequence
  Engineered variant of Galactose Oxidase from Fusarium graminearum
MASAPIGVAIPRNNWAVTCDSAQDGNECIKAIDGNKDTFWHTQYGVNGDPKPPHTITIDMKTVQNVNGLSVLPRQDGNQNGWIGRHEVYLSSDGVNWGSPVASGSWFADSTTKYSNFETRPARYVRLVAITEANGQPWTSIAEINVFQASSYTAPQPELGRWGPTIDLPIVPSAAAIEPTSGRVLMWSSYRNDAFRDSPGGITLTSSWDPSTGIVSDRTSTVTGHDMFCPGISMDGNGQIVVSGGNDAKKTSLYDSSSDSWIPGPDMQVARGYQSSATMSDGRVFTIGGSFSGGQAEKNGEVYSPSSKTWTSLPNAKVNPMLTADKRGLYRSDNHAWLFGWKKGSVFQAGPSTAMNWYYTSGSGDVLSAGKRQSDRGVAPDAMCGNAVMYDAVKGKILTFGGSPDYEDSDATTNAHIITLGEPGTSPNTVFASNGLNFARTFHTSVVLPDGSVFITGGQQRAVPLEDSTPVFTPEIYVPEQDTFYKQNPNSIVRAYHSISLLLPDGRVFNGGGGLCGDCETNHFDAQIFTPNYLYDSNGNLATRPKITRTSTQSVKVGGWITIWTDMSITAASLIRYGTATHTVNTDQRRIGLTLTNNGGNSYSFQVPSDSGVALPGYWMLFVMNSAGVPSVASTINVTQGQTGHHHHHH

SEQ ID NO: 289 - DNA, 1953 bp, Artificial Sequence
  Engineered variant of Galactose Oxidase from Fusarium graminearum
atggcatcagcaccgatcggggtagccatcccgcgcaacaactgggccgttacatgcgattccgcccaggacgggaatgaatgcattaaggcaattgacggtaataaagacacgttttggcacactcaatatggtgtgaacggagatcccaaaccgccgcacaccatcacgatcgatatgaaaacagtacaaaacgtgaatggcctttctgtactgccacgtcaggatggcaatcaaaatggatggatcggacgtcacgaggtgtatttaagttctgatggggtgaattggggatcgcctgtagcgtctgggtcctggtttgccgattccaccacaaagtactctaattttgagacacgtccggcccgttacgtgcgccttgtcgccattaccgaagccaatgggcaaccgtggacttcaattgccgagattaacgtatttcaggcgtctagttacactgccccgcagccggagttggggcgctggggcccgacaatcgatcttcccattgtgccatcggccgccgcaatcgagccaacgagcggtcgtgtcttgatgtggagctcttatcgtaacgatgcgtttcgtgactctcctggcggtattacactgacgagctcatgggaccctagcactggaattgtatccgatcgcactagtaccgttaccgggcacgacatgttttgccccggtatctcgatggacgggaacggtcagatcgtggtcagcggtggtaatgatgcaaaggttacttccttatatgattcgagctcggactcttggattccgggcccggatatgcaggtcgcgcgtgggtatcaatcaagtgcgactatgagtgatgggcgcgtatttacgattggcggcagttttagtggcggtcaagctgagaagaacggggaggtttactccccgagctcggggacgtggacttcgctgccgaatgcaaaagttaaccccatgctgaccgccgataaacggggtctgtaccgtagcgataatcatgcttggctgtttgggtggaaaaagggtagcgtcttccaagcaggtccaagtactgccatgaactggtattatacatctgggtcgggggacgttaagagtgcagggaagcgtcaatcagaccgcggagtagccccagacgcgatgtgcggtaatgccgtaatgtacgacgcagtcaaaggcaaaattttgactttcgggggctcgcccgattatgaggactcagatgcgactacaaatgcccatattatcacgctgggcgagcctggcacgagtccgaatacggtatttgcgagtaatgggttaaatttcgctcgtacctttcatacctcggtggtccttccggacgggagtgtattcatcacaggaggccagcagcgcgcggttccactggaagatagcacacccgtatttactccagagatctacgttcccgaacaagatactttttacaagcaaaacccgaatagtatcgttcgtgcctatcattcgatcagcttgttgctgccggacggacgtgttttcaatggtggcggtggcttatgcggcgattgtgagacgaaccactttgatgcgcaaatctttacgccgaattatctttacgatagcaacgggaacttagccactcgccctaaaatcacccgtacctcaacccagtcagtcaaggtcggcgggtggatcaccatttggactgacatgtcgatcagcgccgcaagtttaattcgctacggaactgctactcacacggtgaacaccgatcagcgacgcatcggcttgacgttagtaaacaacggaggtaattcgtacagctttcaagttccgtcggacagcggggttgctcttccgggatactggatgttgttcgttatgaattccgctggtgtaccctccgttgcgtcgacgattaatgttacccagggccaaactggccaccatcaccatcaccattag

SEQ ID NO: 290 - protein, 650 aa, Artificial Sequence
  Engineered variant of Galactose Oxidase from Fusarium graminearum
MASAPIGVAIPRNNWAVTCDSAQDGNECIKAIDGNKDTFWHTQYGVNGDPKPPHTITIDMKTVQNVNGLSVLPRQDGNQNGWIGRHEVYLSSDGVNWGSPVASGSWFADSTTKYSNFETRPARYVRLVAITEANGQPWTSIAEINVFQASSYTAPQPELGRWGPTIDLPIVPSAAAIEPTSGRVLMWSSYRNDAFRDSPGGITLTSSWDPSTGIVSDRTSTVTGHDMFCPGISMDGNGQIVVSGGNDAKVTSLYDSSSDSWIPGPDMQVARGYQSSATMSDGRVFTIGGSFSGGQAEKNGEVYSPSSGTWTSLPNAKVNPMLTADKRGLYRSDNHAWLFGWKKGSVFQAGPSTAMNWYYTSGSGDVKSAGKRQSDRGVAPDAMCGNAVMYDAVKGKILTFGGSPDYEDSDATTNAHIITLGEPGTSPNTVFASNGLNFARTFHTSVVLPDGSVFITGGQQRAVPLEDSTPVFTPEIYVPEQDTFYKQNPNSIVRAYHSISLLLPDGRVFNGGGGLCGDCETNHFDAQIFTPNYLYDSNGNLATRPKITRTSTQSVKVGGWITIWTDMSISAASLIRYGTATHTVNTDQRRIGLTLVNNGGNSYSFQVPSDSGVALPGYWMLFVMNSAGVPSVASTINVTQGQTGHHHHHH

SEQ ID NO: 291 - DNA, 1953 bp, Artificial Sequence
  Engineered variant of Galactose Oxidase from Fusarium graminearum
atggcatcagcaccgatcggggtagccatcccgcgcaacaactgggccgttacatgcgattccgcccagagtgggaatgaatgcattaaggcaattgacggtaataaagacacgttttggcacactcaatatggtgtgaacggagatcccaaaccgccgcacaccatcacgatcgatatgaaaacagtacaaaacgtgaatggcctttctgtactgccacgtcaggatggcaatcagaatggatggatcggacgtcacgaggtgtatttaagttctgatggggtgaattggggatcgcctgtagcgtctgggtcctggtttgccgattccaccacaaagtactctaattttgagacacgtccggcccgttacgtgcgccttgtcgccattaccgaagccaatgggcaaccgtggacttcaattgccgagattaacgtatttcaggcgtctagttacactgccccgcagccggagttggggcgctggggcccgacaatcgatcttcccattgtgccatcggccgccgcaatcgagccaacgagcggtcgtgtcttgatgtggagctcttatcgtaacgatgcgtttcgtgactctcctggcggtattacactgacgagctcatgggaccctagcactggaattgtatccgatcgcactagtaccgttaccgggcacgacatgttttgccccggtatctcgatggacgggaacggtcagatcgtggtcagcggtggtaatgatgcaaagaaaacttccttatatgattcgagctcggactcttggattccgggcccggatatgcaggtcgcgcgtgggtatcaatcaagtgcgactatgagtgatgggcgcgtatttacgattggcggcagttttagtggcggtcaagctgagaagaacggggaggtttactccccgagctcgaaaatgtggacttcgctgccgaatgcaaaagttaaccccatgctgaccgccgataaacggggtctgtaccgtagcgataatcatgcttggctgtttgggtggaaaaagggtagcgtcttccaagcaggtccaagtactgccatgaactggtattatacatctgggtcgggggacgttaagagtgcagggaagcgtcaatcagaccgcggagtagccccagacgcgatgtgcggtaatgccgtaatgtacgacgcagtcaaaggcaaaattttgactttcgggggctcgcccgattatgaggactcagatgcgactacaaatgcccatattatcacgctgggcgagcctggcacgagtccgaatacggtatttgcgagtaatgggttaaatttcgctcgtacctttcatacctcggtggtccttccggacgggagtgtattcatcacaggaggccagcagcgcgcggttccactggaagatagcacacccgtatttactccagagatctacgttcccgaacaagatactttttacaagcaaaacccgaatagtatcgttcgtgcctatcattcgatcagcttgttgctgccggacggacgtgttttcaatggtggcggtggcttatgcggcgattgtgagacgaaccactttgatgcgcaaatctttacgccgaattatctttacgatagcaacgggaacttagccactcgccctaaaatcacccgtacctcaacccagtcagtcaaggtcggcgggtggatcaccatttggactgacatgtcgatcagcgccgcaagtttaattcgctacggaactgctactcacacggtgaacaccgatcagcgacgcatcggcttgacgttaacgaacaacggaggtaattcgtacagctttcaagttccgtcggacagcggggttgctcttccgggatactggatgttgttcgttatgaattccgctggtgtaccctccgttgcgtcgacgattaatgttacccagggccaaactggccaccatcaccatcaccattag

SEQ ID NO: 292 - protein, 650 aa, Artificial Sequence
  Engineered variant of Galactose Oxidase from Fusarium graminearum
MASAPIGVAIPRNNWAVTCDSAQSGNECIKAIDGNKDTFWHTQYGVNGDPKPPHTITIDMKTVQNVNGLSVLPRQDGNQNGWIGRHEVYLSSDGVNWGSPVASGSWFADSTTKYSNFETRPARYVRLVAITEANGQPWTSIAEINVFQASSYTAPQPELGRWGPTIDLPIVPSAAAIEPTSGRVLMWSSYRNDAFRDSPGGITLTSSWDPSTGIVSDRTSTVTGHDMFCPGISMDGNGQIVVSGGNDAKKTSLYDSSSDSWIPGPDMQVARGYQSSATMSDGRVFTIGGSFSGGQAEKNGEVYSPSSKMWTSLPNAKVNPMLTADKRGLYRSDNHAWLFGWKKGSVFQAGPSTAMNWYYTSGSGDVKSAGKRQSDRGVAPDAMCGNAVMYDAVKGKILTFGGSPDYEDSDATTNAHIITLGEPGTSPNTVFASNGLNFARTFHTSVVLPDGSVFITGGQQRAVPLEDSTPVFTPEIYVPEQDTFYKQNPNSIVRAYHSISLLLPDGRVFNGGGGLCGDCETNHFDAQIFTPNYLYDSNGNLATRPKITRTSTQSVKVGGWITIWTDMSISAASLIRYGTATHTVNTDQRRIGLTLTNNGGNSYSFQVPSDSGVALPGYWMLFVMNSAGVPSVASTINVTQGQTGHHHHHH

SEQ ID NO: 293 - DNA, 1953 bp, Artificial Sequence
  Engineered variant of Galactose Oxidase from Fusarium graminearum
atggcatcagcaccgatcggggtagccatcccgcgcaacaactgggccgttacatgcgattccgcccaggacgggaatgaatgtattaaggcaattgacggtaataaagacacgttttggcacactcaatatggtgtgaacggagatcccaaaccgccgcacaccatcacgatcgatatgaaaacagtacaaaacgtgaatggcctttctgtactgccacgtcaggatggcaatcagaatggatggatcggacgtcacgaggtgtatttaagttctgatggggtgaattggggatcgcctgtagcgtctgggtcctggtttgccgattccaccacaaagtactctaattttgagacacgtccggcccgttacgtgcgccttgtcgccattaccgaagccaatgggcaaccgtggacttcaattgccgagattaacgtatttcaggcgtctagttacactgccccgcagccggagttggggcgctggggcccgacaatcgatcttcccattgtgccatcggccgccgcaatcgagccaacgagcggtcgtgtcttgatgtggagctcttatcgtaacgatgcgtttcgtgactctcctggcggtattacactgacgagctcatgggaccctagcactggaattgtatccgatcgcactagtaccgttaccgggcacgacatgttttgccccggtatctcgatggacgggaacggtcaaatcgtggtcagcggtggtaatgatgcaaaggttacttccttatatgattcgagctcggactcttggattccgggcccggatatgcaggtcgcgcgtgggtatcagtcaagtgcgactatgagtgatgggcgcgtatttacgattggcggcagttttagtggcggtcaagctgagaagaacggggaggtttactccccgagctcgaaaacgtggacttcgctgccgaatgcaaaagttaaccccatgctgaccgccgataaacggggtctgtaccgtagcgataatcctgcttggctgtttgggtggaaaaagggtagcgtcttccaagcaggtccaagtactgccatgaactggtattatacatctgggtcgggggacgttaagagtgcagggaagcgtcaatcagaccgcggagtagccccagacgcgatgtgcggtaatgccgtaatgtacgacgcagtcaaaggcaaaattttgactttcgggggctcgcccgattatgaggattcagatgcgactacaaatgcccatattatcacgctgggcgagcctggcacgagtccgaatacggtatttgcgagtaatgggttaaatttcgctcgtacctttcatacctcggtggtccttccggacgggagtgtattcatcacaggaggccagcagcgcgcggttccactggaagatagcacacccgtatttactccagagatctacgttcccgaacaagatactttttacaagcaaaacccgaatagtatcgttcgtgcctatcattcgatcagcttgttgctgccggacggacgtgttttcaatggtggcggtggcttatgcggcgattgtgagacgaaccactttgatgcgcaaatctttacgccgaattatctttacgatagcaacgggaacttagccactcgccctaaaatcacccgtacctcaacccagtcagtcaaggtcggcgggtggatcaccatttggactgacatgcaaatcaccgccgcaagtttaattcgctacggaactgctactcacacggtgaacaccgatcagcgacgcatcggcttgacgttaacgaacaacggaggtaattcgtacagctttcaagttccgtcggacagcggggttgctcttccgggatactggatgttgttcgttatgaattccgctggtgtaccctccgttgcgtcgacgattaatgttacccagggccaaactggccaccatcaccatcaccattag

SEQ ID NO: 294 - protein, 650 aa, Artificial Sequence
  Engineered variant of Galactose Oxidase from Fusarium graminearum
MASAPIGVAIPRNNWAVTCDSAQDGNECIKAIDGNKDTFWHTQYGVNGDPKPPHTITIDMKTVQNVNGLSVLPRQDGNQNGWIGRHEVYLSSDGVNWGSPVASGSWFADSTTKYSNFETRPARYVRLVAITEANGQPWTSIAEINVFQASSYTAPQPELGRWGPTIDLPIVPSAAAIEPTSGRVLMWSSYRNDAFRDSPGGITLTSSWDPSTGIVSDRTSTVTGHDMFCPGISMDGNGQIVVSGGNDAKVTSLYDSSSDSWIPGPDMQVARGYQSSATMSDGRVFTIGGSFSGGQAEKNGEVYSPSSKTWTSLPNAKVNPMLTADKRGLYRSDNPAWLFGWKKGSVFQAGPSTAMNWYYTSGSGDVKSAGKRQSDRGVAPDAMCGNAVMYDAVKGKILTFGGSPDYEDSDATTNAHIITLGEPGTSPNTVFASNGLNFARTFHTSVVLPDGSVFITGGQQRAVPLEDSTPVFTPEIYVPEQDTFYKQNPNSIVRAYHSISLLLPDGRVFNGGGGLCGDCETNHFDAQIFTPNYLYDSNGNLATRPKITRTSTQSVKVGGWITIWTDMQITAASLIRYGTATHTVNTDQRRIGLTLTNNGGNSYSFQVPSDSGVALPGYWMLFVMNSAGVPSVASTINVTQGQTGHHHHHH

SEQ ID NO: 295 - DNA, 1953 bp, Artificial Sequence
  Engineered variant of Galactose Oxidase from Fusarium graminearum
atggcatcagcaccgatcggggtagccatcccgcgcaacaactgggccgttacatgcgattccgcccaggacgggaatgaatgcattaaggcaattgacggtaataaagacacgttttggcacactcaatatggtgtgaacggagatcccaaaccgccgcacaccatcacgatcgatatgaaaacagtacaaaacgtgaatggcctttctgtactgccacgtcaggatggcaatcagaatggatggatcggacgtcacgaggtgtatttaagttctgatggggtgaattggggatcgcctgtagcgtctgggtcctggtttgccgattccaccacaaagtactctaattttgagacacgtccggcccgttacgtgcgccttgtcgccattaccgaagccaatgggcaaccgtggacttcaattgccgagattaacgtatttcaggcgtctagttacactgccccgcagccggagttggggcgctggggcccgacaatcgatcttcccattgtgccatcggccgccgcaatcgagccaacgagcggtcgtgtcttgatgtggagctcttatcgtaacgatgcgtttcgtgactctcctggcggtattacactgacgagctcatgggaccctagcactggaattgtatccgatcgcactagtaccgttaccgggcacgacatgttttgccccggtatctcgatggacgggaacggtcagatcgtggtcagcggtggtaatgatgcaaaggttacttccttatatgattcgagctcggactcttggattccgggcccggatatgcaggtcgcgcgtgggtatcaatcaagtgcgactatgagtgatgggcgcgtatttacgattggcggcagttttagtggcggtcaagctgagaagaacggggaggtttactccccgagctcgaaaacgtggacttcgctgccgaatgcaaaagttaaccccatgctgaccgccgataaacggggtctgtaccgtagcgataatcatgcttgggcgtttgggtggaaaaagggtagcgtcttccaagcaggtccaagtactgccatgaactggtattatacatctgggtcgggggacgttaagagtgcagggaagcgtcaatcagaccgcggagtagccccagacgcgatgtgcggtaatgccgtaatgtacgacgcagtcaaaggcaaaattttgactttcgggggctcgcccgattatgaggagtcagatgcgactacaaatgcccatattatcacgctgggcgagcctggcacgagtccgaatacggtatttgcgagtaatgggttaaatttcgctcgtacctttcatacctcggtggtccttccggacgggagtgtattcatcacaggaggccagcagcgcgcggttccactggaagatagcacacccgtatttactccagagatctacgttcccgaacaagatactttttacaagcaaaacccgaatagtatcgttcgtgcctatcattcgatcagcttgttgctgccggacggacgtgttttcaatggtggcggtggcttatgcggcgattgtgagacgaaccactttgatgcgcaaatctttacgccgaattatctttacgatagcaacgggaacttagccactcgccctaaaatcacccgtacctcaacccagtcagtcaaggtcggcgggtggatcaccatttggactgacatgcaaatcaccgccgcaagtttaattcgctacggaactgctactcacacggtgaacaccgatcagcgacgcatcggcttgacgttaacgaacaacggaggtaattcgtacagctttcaagttccgtcggacagcggggttgctcttccgggatactggatgttgttcgttatgaattccgctggtgtaccctccgttgcgtcgacgattaatgttacccagggccaaactggccaccatcaccatcaccattag

SEQ ID NO: 296 - protein, 650 aa, Artificial Sequence
  Engineered variant of Galactose Oxidase from Fusarium graminearum
MASAPIGVAIPRNNWAVTCDSAQDGNECIKAIDGNKDTFWHTQYGVNGDPKPPHTITIDMKTVQNVNGLSVLPRQDGNQNGWIGRHEVYLSSDGVNWGSPVASGSWFADSTTKYSNFETRPARYVRLVAITEANGQPWTSIAEINVFQASSYTAPQPELGRWGPTIDLPIVPSAAAIEPTSGRVLMWSSYRNDAFRDSPGGITLTSSWDPSTGIVSDRTSTVTGHDMFCPGISMDGNGQIVVSGGNDAKVTSLYDSSSDSWIPGPDMQVARGYQSSATMSDGRVFTIGGSFSGGQAEKNGEVYSPSSKTWTSLPNAKVNPMLTADKRGLYRSDNHAWAFGWKKGSVFQAGPSTAMNWYYTSGSGDVKSAGKRQSDRGVAPDAMCGNAVMYDAVKGKILTFGGSPDYEESDATTNAHIITLGEPGTSPNTVFASNGLNFARTFHTSVVLPDGSVFITGGQQRAVPLEDSTPVFTPEIYVPEQDTFYKQNPNSIVRAYHSISLLLPDGRVFNGGGGLCGDCETNHFDAQIFTPNYLYDSNGNLATRPKITRTSTQSVKVGGWITIWTDMQITAASLIRYGTATHTVNTDQRRIGLTLTNNGGNSYSFQVPSDSGVALPGYWMLFVMNSAGVPSVASTINVTQGQTGHHHHHH

SEQ ID NO: 297 - DNA, 1953 bp, Artificial Sequence
  Engineered variant of Galactose Oxidase from Fusarium graminearum
atggcatcagcaccgatcggggtagccatcccgcgcaacaactgggccgttacatgcgattccgcccaggacgggaatgaatgcattaaggcaattgacggtaataaagacacgttttggcacactcaatatggtgtgaacggagatcccaaaccgccgcacaccatcacgatcgatatgaaaacagtacaaaacgtgaatggcctttctgtactgccacgtcaggatggcaatcagaatggatggatcggacgtcacgaggtgtatttaagttctgatggggtgaattggggatcgcctgtagcgtctgggtcctggtttgccgattccaccacaaagtactctaattttgagacacgtccggcccgttacgtgcgccttgtcgccattaccgaagccaatgggcaaccgtggacttcaattgccgagattaacgtatttcaggcgtctagttacactgccccgcagccggagttggggcgctggggcccgacaatcgatcttcccattgtgccatcggccgccgcaatcgagccaacgagcggtcgtgtcttgatgtggagctcttatcgtaacgatgcgtttcgtgactctcctggcggtattacactgacgagctcatgggaccctagcactggaattgtatccgatcgcactagtaccgttaccgggcacgacatgttttgccccggtatctcgatggacgggaacggtcaaatcgtggtcagcggtggtaatgatgcaaaggttacttccttatatgattcgagctcggactcttggattccgggcccggatatgcaggtcgcgcgtgggtatcaatcaagtgcgactatgagtgatgggcgcgtatttacgattggcggcagttttagtggcggtcaagctgagaagaacggggaggtttactccccgagctcgaaaacgtggacttcgctgccgaatgcaaaagttaaccccatgctgaccgccgataaacggggtctgtaccgtagcgataatcatgcttggctgtttgggtggaaaaagggtagcgtcttccaagcaggtccaagtactgccatgaactggtattatacatctgggtcgggggacgttaagagtgcagggaagcgtcaatcagaccgcggagtagccccagacgcgatgtgcggtaatgccgtaatgtacgacgcagtcaaaggcaaaattttgactttcgggggctcgcccgattatgaggattcagatgcgactacaaatgcccatattatcacgctgggcgagcctggcacgagtccgaatacggtatttgcgagtaatgggttaaatttcgctcgtacctttcatacctcggtggtccttccggacgggagtgtattcatcacaggaggccagcagcgcgcggttccactggaagatagcacacccgtatttactccagagatctacgttcccgaacaagatactttttacaagcaaaacccgaatagtatcgttcgtgcctatcattcgatcagcttgttgctgccggacggacgtgttttcaatggtggcggtggcttatgcggcgattgtgagacgaaccactttgatgcgcaaatctttacgccgaattatctttacgatagcaacgggaacttagccactcgccctaaaatcacccgtacctcaacccagtcagtcaaggtcggcgggtggatcaccatttggactgacatgcaaatcaccgccgcaagtttaattcgctacggaactgctactcacacggtgaacaccgatcagcgacgcatcggcttgacgttaacgaacaacggaggtaattcgtacagctttcaagttccgtcggacagcggggttgctcttccgggatactggatgttgttcgttatgaattccgctggtgtaccctccgttgcgtcgacgattaatgttacccagggccaaactggccaccatcaccatcaccattag

SEQ ID NO: 298 - protein, 650 aa, Artificial Sequence
  Engineered variant of Galactose Oxidase from Fusarium graminearum
MASAPIGVAIPRNNWAVTCDSAQDGNECIKAIDGNKDTFWHTQYGVNGDPKPPHTITIDMKTVQNVNGLSVLPRQDGNQNGWIGRHEVYLSSDGVNWGSPVASGSWFADSTTKYSNFETRPARYVRLVAITEANGQPWTSIAEINVFQASSYTAPQPELGRWGPTIDLPIVPSAAAIEPTSGRVLMWSSYRNDAFRDSPGGITLTSSWDPSTGIVSDRTSTVTGHDMFCPGISMDGNGQIVVSGGNDAKVTSLYDSSSDSWIPGPDMQVARGYQSSATMSDGRVFTIGGSFSGGQAEKNGEVYSPSSKTWTSLPNAKVNPMLTADKRGLYRSDNHAWLFGWKKGSVFQAGPSTAMNWYYTSGSGDVKSAGKRQSDRGVAPDAMCGNAVMYDAVKGKILTFGGSPDYEDSDATTNAHIITLGEPGTSPNTVFASNGLNFARTFHTSVVLPDGSVFITGGQQRAVPLEDSTPVFTPEIYVPEQDTFYKQNPNSIVRAYHSISLLLPDGRVFNGGGGLCGDCETNHFDAQIFTPNYLYDSNGNLATRPKITRTSTQSVKVGGWITIWTDMQITAASLIRYGTATHTVNTDQRRIGLTLTNNGGNSYSFQVPSDSGVALPGYWMLFVMNSAGVPSVASTINVTQGQTGHHHHHH

SEQ ID NO: 299 - DNA, 1953 bp, Artificial Sequence
  Engineered variant of Galactose Oxidase from Fusarium graminearum
atggcatcagcaccgatcggggtagccatcccgcgcaacaactgggccgttacatgcgattccgcccaggacgggaatgaatgcattaaggcaattgacggtaataaagacacgttttggcacactcaatatggtgtgaacggagatcccaaaccgccgcacaccatcacgatcgatatgaaaacagtacaaaacgtgaatggcctttctgtactgccacgtcaggatggcaatcagaatggatggatcggacgtcacgaggtgtatttaagttctgatggggtgaattggggatcgcctgtagcgtctgggtcctggtttgccgattccaccacaaagtactctaattttgagacacgtccggcccgttacgtgcgccttgtcgccattaccgaagccaatgggcaaccgtggacttcaattgccgagattaacgtatttcaggcgtctagttacactgccccgcagccggagttggggcgctggggcccgacaatcgatcttcccattgtgccatcggccgccgcaatcgagccaacgagcggtcgtgtcttgatgtggagctcttatcgtaacgatgcgtttcgtgactctcctggcggtattacactgacgagctcatgggaccctagcactggaattgtatccgatcgcactagtaccgttaccgggcacgacatgttttgccccggtatctcgatggacgggaacggtcagatcgtggtcagcggtggtaatgatgcaaaggttacttccttatatgattcgagctcggactcttggattccgggcccggatatgcaggtcgcgcgtgggtatcaatcaagtgcgactatgagtgatgggcgcgtatttacgattggcggcagttttagtggcggtcaagctgagaagaacggggaggtttactccccgagctcgaaaacgtggacttcgctgccgaatgcaaaaattaaccccatgctgaccgccgataaacggggtctgtaccgtagcgataatcatgcttggctgtttgggtggaaaaagggtagcgtcttccaagcaggtccaagtactgccatgaactggtattatacatctgggtcgggggacgttaagagtgcagggaagcgtcaatcagaccgcggagtagccccagacgcgatgtgcggtaatgccgtaatgtacgacgcagtcaaaggcaaaattttgactttcgggggctcgcccgattatgaggagtcagatgcgactacaaatgcccatattatcacgctgggcgagcctggcacgagtccgaatacggtatttgcgagtaatgggttaaatttcgctcgtacctttcatacctcggtggtccttccggacgggagtgtattcatcacaggaggccagcagcgcgcggttccactggaagatagcacacccgtatttactccagagatctacgttcccgaacaagatactttttacaagcaaaacccgaatagtatcgttcgtgcctatcattcgatcagcttgttgctgccggacggacgtgttttcaatggtggcggtggcttatgcggcgattgtgagacgaaccactttgatgcgcaaatctttacgccgaattatctttacgatagcaacgggaacttagccactcgccctaaaatcacccgtacctcaacccagtcagtcaaggtcggcgggtggatcaccatttggactgacatgcaaatcaccgccgcaagtttaattcgctacggaactgctactcacacggtgaacaccgatcagcgacgcatcggcttgacgttaacgaacaacggaggtaattcgtacagctttcaagttccgtcggacagcggggttgctcttccgggatactggatgttgttcgttatgaattccgctggtgtaccctccgttgcgtcgacgattaatgttacccagggccaaactggccaccatcaccatcaccattag

SEQ ID NO: 300 - protein, 650 aa, Artificial Sequence
  Engineered variant of Galactose Oxidase from Fusarium graminearum
MASAPIGVAIPRNNWAVTCDSAQDGNECIKAIDGNKDTFWHTQYGVNGDPKPPHTITIDMKTVQNVNGLSVLPRQDGNQNGWIGRHEVYLSSDGVNWGSPVASGSWFADSTTKYSNFETRPARYVRLVAITEANGQPWTSIAEINVFQASSYTAPQPELGRWGPTIDLPIVPSAAAIEPTSGRVLMWSSYRNDAFRDSPGGITLTSSWDPSTGIVSDRTSTVTGHDMFCPGISMDGNGQIVVSGGNDAKVTSLYDSSSDSWIPGPDMQVARGYQSSATMSDGRVFTIGGSFSGGQAEKNGEVYSPSSKTWTSLPNAKINPMLTADKRGLYRSDNHAWLFGWKKGSVFQAGPSTAMNWYYTSGSGDVKSAGKRQSDRGVAPDAMCGNAVMYDAVKGKILTFGGSPDYEESDATTNAHIITLGEPGTSPNTVFASNGLNFARTFHTSVVLPDGSVFITGGQQRAVPLEDSTPVFTPEIYVPEQDTFYKQNPNSIVRAYHSISLLLPDGRVFNGGGGLCGDCETNHFDAQIFTPNYLYDSNGNLATRPKITRTSTQSVKVGGWITIWTDMQITAASLIRYGTATHTVNTDQRRIGLTLTNNGGNSYSFQVPSDSGVALPGYWMLFVMNSAGVPSVASTINVTQGQTGHHHHHH

SEQ ID NO: 301 - DNA, 1953 bp, Artificial Sequence
  Engineered variant of Galactose Oxidase from Fusarium graminearum
atggcatcagcaccgatcggggtagccatcccgcgcaacaactgggccgttacatgcgattccgcccaggacgggaatgaatgtattaaggcaattgacggtaataaagacacgttttggcacactcaatatggtgtgaacggagatcccaaaccgccgcacaccatcacgatcgatatgaaaacagtacaaaacgtgaatggcctttctgtactgccacgtcaggatggcaatcagaatggatggatcggacgtcacgaggtgtatttaagttctgatggggtgaattggggatcgcctgtagcgtctgggtcctggtttgccgattccaccacaaagtactctaattttgagacacgtccggcccgttacgtgcgccttgtcgccattaccgaagccaatgggcaaccgtggacttcaattgccgagattaacgtatttcaggcgtctagttacactgccccgcagccggagttggggcgctggggcccgacaatcgatcttcccattgtgccatcggccgccgcaatcgagccaacgagcggtcgtgtcttgatgtggagctcttatcgtaacgatgcgtttcgtgactctcctggcggtattacactgacgagctcatgggaccctagcactggaattgtatccgatcgcactagtaccgttaccgggcacgacatgttttgccccggtatctcgatggacgggaacggtatgatcgtggtcagcggtggtaatgatgcaaaggttacttccttatatgattcgagctcggactcttggattccgggcccggatatgcaggtcgcgcgtgggtatcagtcaagtgcgactatgagtgatgggcgcgtatttacgattggcggcagtttcagtggcggtcaagctgagaagaacggggaggtttactccccgagctcgaaaacgtggacttcgctgccgaatgccaaagttaaccccatgctgaccgccgataaacggggtctgtaccgtagcgataatcatgcttggctgtttgggtggaaaaagggtagcgtcttccaagcaggtccaagtactgccatgaactggtattatacatctgggtcgggggacgttaagagtgcagggaagcgtcaatcagaccgcggagtagccccagacgcgatgtgcggtaatgccgtaatgtacgacgcagtcaaaggcaaaattttgactttcgggggctcgcccgattatgaggattcagatgcgactacaaatgcccatattatcacgctgggcgagcctggcacgagtccgaatacggtatttgcgagtaatgggttaaatttcgctcgtacctttcatacctcggtggtccttccggacgggagtgtattcatcacaggaggccagcagcgcgcggttccactggaagatagcacacccgtatttactccagagatctacgttcccgaacaagatactttttacaagcaaaacccgaatagtatcgttcgtgcctatcattcgatcagcttgttgctgccggacggacgtgttttcaatggtggcggtggcttatgcggcgattgtgagacgaaccactttgatgcgcaaatctttacgccgaattatctttacgatagcaacgggaacttagccactcgccctaaaatcacccgtacctcaacccagtcagtcaaggtcggcgggtggatcaccatttggactgacatgcaaatcaccgccgcaagtttaattcgctacggaactgctactcacacggtgaacaccgatcagcgacgcatcggcttgacgttaacgaacaacggaggtaattcgtacagctttcaagttccgtcggacagcggggttgctcttccgggatactggatgttgttcgttatgaattccgctggtgtaccctccgttgcgtcgacgattaatgttacccagggccaaactggccaccatcaccatcaccattag

SEQ ID NO: 302 - protein, 650 aa, Artificial Sequence
  Engineered variant of Galactose Oxidase from Fusarium graminearum
MASAPIGVAIPRNNWAVTCDSAQDGNECIKAIDGNKDTFWHTQYGVNGDPKPPHTITIDMKTVQNVNGLSVLPRQDGNQNGWIGRHEVYLSSDGVNWGSPVASGSWFADSTTKYSNFETRPARYVRLVAITEANGQPWTSIAEINVFQASSYTAPQPELGRWGPTIDLPIVPSAAAIEPTSGRVLMWSSYRNDAFRDSPGGITLTSSWDPSTGIVSDRTSTVTGHDMFCPGISMDGNGMIVVSGGNDAKVTSLYDSSSDSWIPGPDMQVARGYQSSATMSDGRVFTIGGSFSGGQAEKNGEVYSPSSKTWTSLPNAKVNPMLTADKRGLYRSDNHAWLFGWKKGSVFQAGPSTAMNWYYTSGSGDVKSAGKRQSDRGVAPDAMCGNAVMYDAVKGKILTFGGSPDYEDSDATTNAHIITLGEPGTSPNTVFASNGLNFARTFHTSVVLPDGSVFITGGQQRAVPLEDSTPVFTPEIYVPEQDTFYKQNPNSIVRAYHSISLLLPDGRVFNGGGGLCGDCETNHFDAQIFTPNYLYDSNGNLATRPKITRTSTQSVKVGGWITIWTDMQITAASLIRYGTATHTVNTDQRRIGLTLTNNGGNSYSFQVPSDSGVALPGYWMLFVMNSAGVPSVASTINVTQGQTGHHHHHH

SEQ ID NO: 303 - DNA, 1953 bp, Artificial Sequence
  Engineered variant of Galactose Oxidase from Fusarium graminearum
atggcatcagcaccgatcggggtagccatcccgcgcaacaactgggccgttacatgcgattccgcccaggacgggaatgaatgtattaaggcaattgacggtaataaagacacgttttggcacactcaatatggtgtgaacggagatcccaaaccgccgcacaccatcacgatcgatatgaaaacagtacaaaacgtgaatggcctttctgtactgccacgtcaggatggcaatcagaatggatggatcggacgtcacgaggtgtatttaagttctgatggggtgaattggggatcgcctgtagcgtctgggtcctggtttgccgattccaccacaaagtactctaattttgagacacgtccggcccgttacgtgcgccttgtcgccattaccgaagccaatgggcaaccgtggacttcaattgccgagattaacgtatttcaggcgtctagttacactgccccgcagccggagttggggcgctggggcccgacaatcgatcttcccattgtgccatcggccgccgcaatcgagccaacgagcggtcgtgtcttgatgtggagctcttatcgtaacgatgcgtttcgtgactctcctggcggtattacactgacgagctcatgggaccctagcactggaattgtatccgatcgcactagtaccgttaccgggcacgacatgttttgccccggtatctcgatggacgggaacggtatgatcgtggtcagcggtggtaatgatgcaaaggttacttccttatatgattcgagctcggactcttggattccgggcccggatatgcaggtcgcgcgtgggtatcagtcaagtgcgactatgagtgatgggcgcgtatttacgattggcggcagttacagtggcggtcaagctgagaagaacggggaggtttactccccgagctcgaaaacgtggacttcgctgccgaatgcaaaagttaaccccatgctgaccgccgataaacggggtctgtaccgtagcgataatcatgcttggctgtttgggtggaaaaagggtagcgtcttccaagcaggtccaagtactgccatgaactggtattatacatctgggtcgggggacgttaagagtgcagggaagcgtcaatcagaccgcggagtagccccagacgcgatgtgcggtaatgccgtaatgtacgacgcagtcaaaggcaaaattttgactttcgggggctcgcccgattatgaggattcagatgcgactacaaatgcccatattatcacgctgggcgagcctggcacgagtccgaatacggtatttgcgagtaatgggttaaatttcgctcgtacctttcatacctcggtggtccttccggacgggagtgtattcatcacaggaggccagcagcgcgcggttccactggaagatagcacacccgtatttactccagagatctacgttcccgaacaagatactttttacaagcaaaacccgaatagtatcgttcgtgcctatcattcgatcagcttgttgctgccggacggacgtgttttcaatggtggcggtggcttatgcggcgattgtgagacgaaccactttgatgcgcaaatctttacgccgaattatctttacgatagcaacgggaacttagccactcgccctaaaatcacccgtacctcaacccagtcagtcaaggtcggcgggtggatcaccatttggactgacatgcaaatcaccgccgcaagtttaattcgctacggaactgctactcacacggtgaacaccgatcagcgacgcatcggcttgacgttaacgaacaacggaggtaattcgtacagctttcaagttccgtcggacagcggggttgctcttccgggatactggatgttgttcgttatgaattccgctggtgtaccctccgttgcgtcgacgattaatgttacccagggccaaactggccaccatcaccatcaccattag

SEQ ID NO: 304 - protein, 650 aa, Artificial Sequence
  Engineered variant of Galactose Oxidase from Fusarium graminearum
MASAPIGVAIPRNNWAVTCDSAQDGNECIKAIDGNKDTFWHTQYGVNGDPKPPHTITIDMKTVQNVNGLSVLPRQDGNQNGWIGRHEVYLSSDGVNWGSPVASGSWFADSTTKYSNFETRPARYVRLVAITEANGQPWTSIAEINVFQASSYTAPQPELGRWGPTIDLPIVPSAAAIEPTSGRVLMWSSYRNDAFRDSPGGITLTSSWDPSTGIVSDRTSTVTGHDMFCPGISMDGNGMIVVSGGNDAKVTSLYDSSSDSWIPGPDMQVARGYQSSATMSDGRVFTIGGSYSGGQAEKNGEVYSPSSKTWTSLPNAKVNPMLTADKRGLYRSDNHAWLFGWKKGSVFQAGPSTAMNWYYTSGSGDVKSAGKRQSDRGVAPDAMCGNAVMYDAVKGKILTFGGSPDYEDSDATTNAHIITLGEPGTSPNTVFASNGLNFARTFHTSVVLPDGSVFITGGQQRAVPLEDSTPVFTPEIYVPEQDTFYKQNPNSIVRAYHSISLLLPDGRVFNGGGGLCGDCETNHFDAQIFTPNYLYDSNGNLATRPKITRTSTQSVKVGGWITIWTDMQITAASLIRYGTATHTVNTDQRRIGLTLTNNGGNSYSFQVPSDSGVALPGYWMLFVMNSAGVPSVASTINVTQGQTGHHHHHH

SEQ ID NO: 305 - DNA, 1953 bp, Artificial Sequence
  Engineered variant of Galactose Oxidase from Fusarium graminearum
atggcatcagcaccgatcggggtagccatcccgcgcaacaactgggccgttacatgcgattccgcccaggacgggaatgaatgtattaaggcaattgacggtaataaagacacgttttggcacactcaatatggtgtgaacggagatcccaaaccgccgcacaccatcacgatcgatatgaaaacagtacaaaacgtgaatggcctttctgtactgccacgtcaggatggcaatcagaatggatggatcggacgtcacgaggtgtatttaagttctgatggggtgaattggggatcgcctgtagcgtctgggtcctggtttgccgattccaccacaaagtactctaattttgagacacgtccggcccgttacgtgcgccttgtcgccattaccgaagccaatgggcaaccgtggacttcaattgccgagattaacgtatttcaggcgtctagttacactgccccgcagccggagttggggcgctggggcccgacaatcgatcttcccattgtgccatcggccgccgcaatcgagccaacgagcggtcgtgtcttgatgtggagctcttatcgtaacgatgcgtttcgtgactctcctggcggtattacactgacgagctcatgggaccctagcactggaattgtatccgatcgcactagtaccgttaccgggcacgacatgttttgccccggtatctcgatggacgggaacggtcaaatcgtggtcagcggtggtaatgatgcaaaggttacttccttatatgattcgagctcggactcttggattccgggcccggatatgcaggtcgcgcgtgggtatcaatcaagtgcgactatgagtgatgggcgcgtatttacgattggcggcagttacagtggcggtcaagctgagaagaacggggaggtttactccccgagctcgaaaacgtggacttcgctgccgaatgcaaaagttaaccccatgctgaccgccgataaacggggtctgtaccgtagcgataatcatgcttggctgtttgggtggaaaaagggtagcgtcttccaagcaggtccaagtactgccatgaactggtattatacatctgggtcgggggacgttaagagtgcagggaagcgtcaatcagaccgcggagtagccccagacgcgatgtgcggtaatgccgtaatgtacgacgcagtcaaaggcaaaattttgactttcgggggctcgcccgattatgaggattcagatgcgactacaaatgcccatattatcacgctgggcgagcctggcacgagtccgaatacggtatttgcgagtaatgggttaaatttcgctcgtacctttcatacctcggtggtccttccggacgggagtgtattcatcacaggaggccagcagcgcgcggttccactggaagatagcacacccgtatttactccagagatctacgttcccgaacaagatactttttacaagcaaaacccgaatagtatcgttcgtgcctatcattcgatcagcttgttgctgccggacggacgtgttttcaatggtggcggtggcttatgcggcgattgtgagacgaaccactttgatgcgcaaatctttacgccgaattatctttacgatagcaacgggaacttagccactcgccctaaaatcacccgtacctcaacccagtcagtcaaggtcggcgggtggatcaccatttggactgacatgcaaatcaccgccgcaagtttaattcgctacggaactgctactcacacggtgaacaccgatcagcgacgcatcggcttgacgttaacgaacaacggaggtaattcgtacagctttcaagttccgtcggacagcggggttgctcttccgggatactggatgttgttcgttatgaattccgctggtgtaccctccgttgcgtcgacgattaatgttacccagggccaaactggccaccatcaccatcaccattag

SEQ ID NO: 306 - protein, 650 aa, Artificial Sequence
  Engineered variant of Galactose Oxidase from Fusarium graminearum
MASAPIGVAIPRNNWAVTCDSAQDGNECIKAIDGNKDTFWHTQYGVNGDPKPPHTITIDMKTVQNVNGLSVLPRQDGNQNGWIGRHEVYLSSDGVNWGSPVASGSWFADSTTKYSNFETRPARYVRLVAITEANGQPWTSIAEINVFQASSYTAPQPELGRWGPTIDLPIVPSAAAIEPTSGRVLMWSSYRNDAFRDSPGGITLTSSWDPSTGIVSDRTSTVTGHDMFCPGISMDGNGQIVVSGGNDAKVTSLYDSSSDSWIPGPDMQVARGYQSSATMSDGRVFTIGGSYSGGQAEKNGEVYSPSSKTWTSLPNAKVNPMLTADKRGLYRSDNHAWLFGWKKGSVFQAGPSTAMNWYYTSGSGDVKSAGKRQSDRGVAPDAMCGNAVMYDAVKGKILTFGGSPDYEDSDATTNAHIITLGEPGTSPNTVFASNGLNFARTFHTSVVLPDGSVFITGGQQRAVPLEDSTPVFTPEIYVPEQDTFYKQNPNSIVRAYHSISLLLPDGRVFNGGGGLCGDCETNHFDAQIFTPNYLYDSNGNLATRPKITRTSTQSVKVGGWITIWTDMQITAASLIRYGTATHTVNTDQRRIGLTLTNNGGNSYSFQVPSDSGVALPGYWMLFVMNSAGVPSVASTINVTQGQTGHHHHHH

SEQ ID NO: 307 - DNA, 1953 bp, Artificial Sequence
  Engineered variant of Galactose Oxidase from Fusarium graminearum
atggcatcagcaccgatcggggtagccatcccgcgcaacaactgggccgttacatgcgattccgcccaggacgggaatgaaggtattaaggcaattgacggtaataaagacacgttttggcacactcaatatggtgtgaacggagatcccaaaccgccgcacaccatcacgatcgatatgaaaacagtacaaaacgtgaatggcctttctgtactgccacgtcaggatggcaatcagaatggatggatcggacgtcacgaggtgtatttaagttctgatggggtgaattggggatcgcctgtagcgtctgggtcctggtttgccgattccaccacaaagtactctaattttgagacacgtccggcccgttacgtgcgccttgtcgccattaccgaagccaatgggcaaccgtggacttcaattgccgagattaacgtatttcaggcgtctagttacactgccccgcagccggagttggggcgctggggcccgacaatcgatcttcccattgtgccatcggccgccgcaatcgagccaacgagcggtcgtgtcttgatgtggagctcttatcgtaacgatgcgtttcgtgactctcctggcggtattacactgacgagctcatgggaccctagcactggaattgtatccgatcgcactagtaccgttaccgggcacgacatgttttgccccggtatctcgatggacgggaacggtatgatcgtggtcagcggtggtaatgatgcaaaggttacttccttatatgattcgagctcggactcttggattccgggcccggatatgcaggtcgcgcgtgggtatcaatcaagtgcgactatgagtgatgggcgcgtatttacgattggcggcagttacagtggcggtcaagctgagaagaacggggaggtttactccccgagctcgaaaacgtggacttcgctgccgaatgcaaaagttaaccccatgctgaccgccgataaacggggtctgtaccgtagcgataatcatgcttggctgtttgggtggaaaaagggtagcgtcttccaagcaggtccaagtactgccatgaactggtattatacatctgggtcgggggacgttaagagtgcagggaagcgtcaatcagaccgcggagtagccccagacgcgatgtgcggtaatgccgtaatgtacgacgcagtcaaaggcaaaattttgactttcgggggctcgcccgattatgaggattcagatgcgactacaaatgcccatattatcacgctgggcgagcctggcacgagtccgaatacggtatttgcgagtaatgggttaaatttcgctcgtacctttcatacctcggtggtccttccggacgggagtgtattcatcacaggaggccagcagcgcgcggttccactggaagatagcacacccgtatttactccagagatctacgttcccgaacaagatactttttacaagcaaaacccgaatagtatcgttcgtgcctatcattcgatcagcttgttgctgccggacggacgtgttttcaatggtggcggtggcttatgcggcgattgtgagacgaaccactttgatgcgcaaatctttacgccgaattatctttacgatagcaacgggaacttagccactcgccctaaaatcacccgtacctcaacccagtcagtcaaggtcggcgggtggatcaccatttggactgacatgcaaatcaccgccgcaagtttaattcgctacggaactgctactcacacggtgaacaccgatcagcgacgcatcggcttgacgttaacgaacaacggaggtaattcgtacagctttcaagttccgtcggacagcggggttgctcttccgggatactggatgttgttcgttatgaattccgctggtgtaccctccgttgcgtcgacgattaatgttacccagggccaaactggccaccatcaccatcaccattag

SEQ ID NO: 308 - protein, 650 aa, Artificial Sequence
  Engineered variant of Galactose Oxidase from Fusarium graminearum
MASAPIGVAIPRNNWAVTCDSAQDGNEGIKAIDGNKDTFWHTQYGVNGDPKPPHTITIDMKTVQNVNGLSVLPRQDGNQNGWIGRHEVYLSSDGVNWGSPVASGSWFADSTTKYSNFETRPARYVRLVAITEANGQPWTSIAEINVFQASSYTAPQPELGRWGPTIDLPIVPSAAAIEPTSGRVLMWSSYRNDAFRDSPGGITLTSSWDPSTGIVSDRTSTVTGHDMFCPGISMDGNGMIVVSGGNDAKVTSLYDSSSDSWIPGPDMQVARGYQSSATMSDGRVFTIGGSYSGGQAEKNGEVYSPSSKTWTSLPNAKVNPMLTADKRGLYRSDNHAWLFGWKKGSVFQAGPSTAMNWYYTSGSGDVKSAGKRQSDRGVAPDAMCGNAVMYDAVKGKILTFGGSPDYEDSDATTNAHIITLGEPGTSPNTVFASNGLNFARTFHTSVVLPDGSVFITGGQQRAVPLEDSTPVFTPEIYVPEQDTFYKQNPNSIVRAYHSISLLLPDGRVFNGGGGLCGDCETNHFDAQIFTPNYLYDSNGNLATRPKITRTSTQSVKVGGWITIWTDMQITAASLIRYGTATHTVNTDQRRIGLTLTNNGGNSYSFQVPSDSGVALPGYWMLFVMNSAGVPSVASTINVTQGQTGHHHHHH

SEQ ID NO: 309 - DNA, 1953 bp, Artificial Sequence
  Engineered variant of Galactose Oxidase from Fusarium graminearum
atggcatcagcaccgatcggggtagccatcccgcgcaacaactgggccgttacatgcgattccgcccaggacgggaatgaatgtattaaggcaattgacggtaataaagacacgttttggcacactcaatatggtgtgaacggagatcccaaaccgccgcacaccatcacgatcgatatgaaaacagtacaaaacgtgaatggcctttctgtactgccacgtcaggatggcaatcagaatggatggatcggacgtcacgaggtgtatttaagttctgatggggtgaattggggatcgcctgtagcgtctgggtcctggtttgccgattccaccacaaagtactctaattttgagacacgtccggcccgttacgtgcgccttgtcgccattaccgaagccaatgggcaaccgtggacttcaattgccgagattaacgtatttcaggcgtctagttacactgccccgcagccggagttggggcgctggggcccgacaatcgatcttcccattgtgccatcggccgccgcaatcgagccaacgagcggtcgtgtcttgatgtggagctcttatcgtaacgatgcgtttcgtgactctcctggcggtattacactgacgagctcatgggaccctagcactggaattgtatccgatcgcactagtaccgttaccgggcacgacatgttttgccccggtatctcgatggacgggaacggtctgatcgtggtcagcggtggtaatgatgcaaaggttacttccttatatgattcgagctcggactcttggattccgggcccggatatgcaggtcgcgcgtgggtatcagtcaagtgcgactatgagtgatgggcgcgtatttacgattggcggtagttttagtggcggtcaagctgagaagaacggggaggtttactccccgagctcgaaaacgtggacttcgctgccgaatgcaaaagttaaccccatgctgaccgccgataaacggggtctgtaccgtagcgataatcatgcttggctgtttgggtggaaaaagggtagcgtcttccaagcaggtccaagtactgccatgaactggtattatacatctgggtcgggggacgttaagagtgcagggaagcgtcaatcagaccgcggagtagccccagacgcgatgtgcggtaatgccgtaatgtacgacgcagtcaaaggcaaaattttgactttcgggggctcgcccgattatgaggattcagatgcgactacaaatgcccatattatcacgctgggcgagcctggcacgagtccgaatacggtatttgcgagtaatgggttaaatttcgctcgtacctttcatacctcggtggtccttccggacgggagtgtattcatcacaggaggccagcagcgcgcggttccactggaagatagcacacccgtatttactccagagatctacgttcccgaacaagatactttttacaagcaaaacccgaatagtatcgttcgtgcctatcattcgatcagcttgttgctgccggacggacgtgttttcaatggtggcggtggcttatgcggcgattgtgagacgaaccactttgatgcgcaaatctttacgccgaattatctttacgatagcaacgggaacttagccactcgccctaaaatcacccgtacctcaacccagtcagtcaaggtcggcgggtggatcaccatttggactgacatgcaaatcaccgccgcaagtttaattcgctacggaactgctactcacacggtgaacaccgatcagcgacgcatcggcttgacgttaacgaacaacggaggtaattcgtacagctttcaagttccgtcggacagcggggttgctcttccgggatactggatgttgttcgttatgaattccgctggtgtaccctccgttgcgtcgacgattaatgttacccagggccaaactggccaccatcaccatcaccattag

SEQ ID NO: 310 - protein, 650 aa, Artificial Sequence
  Engineered variant of Galactose Oxidase from Fusarium graminearum
MASAPIGVAIPRNNWAVTCDSAQDGNECIKAIDGNKDTFWHTQYGVNGDPKPPHTITIDMKTVQNVNGLSVLPRQDGNQNGWIGRHEVYLSSDGVNWGSPVASGSWFADSTTKYSNFETRPARYVRLVAITEANGQPWTSIAEINVFQASSYTAPQPELGRWGPTIDLPIVPSAAAIEPTSGRVLMWSSYRNDAFRDSPGGITLTSSWDPSTGIVSDRTSTVTGHDMFCPGISMDGNGLIVVSGGNDAKVTSLYDSSSDSWIPGPDMQVARGYQSSATMSDGRVFTIGGSFSGGQAEKNGEVYSPSSKTWTSLPNAKVNPMLTADKRGLYRSDNHAWLFGWKKGSVFQAGPSTAMNWYYTSGSGDVKSAGKRQSDRGVAPDAMCGNAVMYDAVKGKILTFGGSPDYEDSDATTNAHIITLGEPGTSPNTVFASNGLNFARTFHTSVVLPDGSVFITGGQQRAVPLEDSTPVFTPEIYVPEQDTFYKQNPNSIVRAYHSISLLLPDGRVFNGGGGLCGDCETNHFDAQIFTPNYLYDSNGNLATRPKITRTSTQSVKVGGWITIWTDMQITAASLIRYGTATHTVNTDQRRIGLTLTNNGGNSYSFQVPSDSGVALPGYWMLFVMNSAGVPSVASTINVTQGQTGHHHHHH

SEQ ID NO: 311 - DNA, 1953 bp, Artificial Sequence
  Engineered variant of Galactose Oxidase from Fusarium graminearum
atggcatcagcaccgatcggggtagccatcccgcgcaacaactgggccgttacatgcgattccgcccaggacgggaatgaatgtattaaggcaattgacggtaataaagacacgttttggcacactcaatatggtgtgaacggagatcccaaaccgccgcacaccatcacgatcgatatgaaaacagtacaaaacgtgaatggcctttctgtactgccacgtcaggatggcaatcagaatggatggatcggacgtcacgaggtgtatttaagttctgatggggtgaattggggatcgcctgtagcgtctgggtcctggtttgccgattccaccacaaagtactctaattttgagacacgtccggcccgttacgtgcgccttgtcgccattaccgaagccaatgggcaaccgtggacttcaattgccgagattaacgtatttcaggcgtctagttacactgccccgcagccggagttggggcgctggggcccgacaatcgatcttcccattgtgccatcggccgccgcaatcgagccaacgagcggtcgtgtcttgatgtggagctcttatcgtaacgatgcgtttcgtgactctcctggcggtattacactgacgagctcatgggaccctagcactggaattgtatccgatcgcactagtaccgttaccgggcacgacatgttttgccccggtatctcgatggacgggaacggtatgatcgtggtcagcggtggtaatgatgcaaaggttacttccttatatgattcgagctcggactcttggattccgggcccggatatgcaggtcgcgcgtgggtatcaatcaagtgcgactatgagtgatgggcgcgtatttacgattggcggcagttttagtggcggtcaagctgagaagaacggggaggtttactccccgagctcgaaaacgtggacttcgctgccgaatgcaaaagttaaccccatgctgaccgccgataaacggggtctgtaccgtagcgataatcatgcttggctgtttgggtggaaaaagggtagcgtcttccaagcaggtccaagtactgccatgaactggtattatacatctgggtcgggggacgttaagagtgcagggaagcgtcaatcagaccgcggagtagccccagacgcgatgtgcggtaatgccgtaatgtacgacgcagtcaaaggcaaaattttgactttcgggggctcgcccgattatgaggaatcagatgcgactacaaatgcccatattatcacgctgggcgagcctggcacgagtccgaatacggtatttgcgagtaatgggttaaatttcgctcgtacctttcatacctcggtggtccttccggacgggagtgtattcatcacaggaggccagcagcgcgcggttccactggaagatagcacacccgtatttactccagagatctacgttcccgaacaagatactttttacaagcaaaacccgaatagtatcgttcgtgcctatcattcgatcagcttgttgctgccggacggacgtgttttcaatggtggcggtggcttatgcggcgattgtgagacgaaccactttgatgcgcaaatctttacgccgaattatctttacgatagcaacgggaacttagccactcgccctaaaatcacccgtacctcaacccagtcagtcaaggtcggcgggtggatcaccatttggactgacatgcaaatcaccgccgcaagtttaattcgctacggaactgctactcacacggtgaacaccgatcagcgacgcatcggcttgacgttaacgaacaacggaggtaattcgtacagctttcaagttccgtcggacagcggggttgctcttccgggatactggatgttgttcgttatgaattccgctggtgtaccctccgttgcgtcgacgattaatgttacccagggccaaactggccaccatcaccatcaccattag

SEQ ID NO: 312 - protein, 650 aa, Artificial Sequence
  Engineered variant of Galactose Oxidase from Fusarium graminearum
MASAPIGVAIPRNNWAVTCDSAQDGNECIKAIDGNKDTFWHTQYGVNGDPKPPHTITIDMKTVQNVNGLSVLPRQDGNQNGWIGRHEVYLSSDGVNWGSPVASGSWFADSTTKYSNFETRPARYVRLVAITEANGQPWTSIAEINVFQASSYTAPQPELGRWGPTIDLPIVPSAAAIEPTSGRVLMWSSYRNDAFRDSPGGITLTSSWDPSTGIVSDRTSTVTGHDMFCPGISMDGNGMIVVSGGNDAKVTSLYDSSSDSWIPGPDMQVARGYQSSATMSDGRVFTIGGSFSGGQAEKNGEVYSPSSKTWTSLPNAKVNPMLTADKRGLYRSDNHAWLFGWKKGSVFQAGPSTAMNWYYTSGSGDVKSAGKRQSDRGVAPDAMCGNAVMYDAVKGKILTFGGSPDYEESDATTNAHIITLGEPGTSPNTVFASNGLNFARTFHTSVVLPDGSVFITGGQQRAVPLEDSTPVFTPEIYVPEQDTFYKQNPNSIVRAYHSISLLLPDGRVFNGGGGLCGDCETNHFDAQIFTPNYLYDSNGNLATRPKITRTSTQSVKVGGWITIWTDMQITAASLIRYGTATHTVNTDQRRIGLTLTNNGGNSYSFQVPSDSGVALPGYWMLFVMNSAGVPSVASTINVTQGQTGHHHHHH

SEQ ID NO: 313 - DNA, 1953 bp, Artificial Sequence
  Engineered variant of Galactose Oxidase from Fusarium graminearum
atggcatcagcaccgatcggggtagccatcccgcgcaacaactgggccgttacatgcgattccgcccaggacgggaatgaatgcattaaggcaattgacggtaataaagacacgttttggcacactcaatatggtgtgaacggagatcccaaaccgccgcacaccatcacgatcgatatgaaaacagtacaaaacgtgaatggcctttctgtactgccacgtcaggatggcaatcagaatggatggatcggacgtcacgaggtgtatttaagttctgatggggtgaattggggatcgcctgtagcgtctgggtcctggtttgccgattccaccacaaagtactctaattttgagacacgtccggcccgttacgtgcgccttgtcgccattaccgaagccaatgggcaaccgtggacttcaattgccgagattaacgtatttcaggcgtctagttacactgccccgcagccggagttggggcgctggggcccgacaatcgatcttcccattgtgccatcggccgccgcaatcgagccaacgagcggtcgtgtcttgatgtggagctcttatcgtaacgatgcgtttcgtgactctcctggcggtattacactgacgagctcatgggaccctagcactggaattgtatccgatcgcactagtaccgttaccgggcacgacatgttttgccccggtatctcgatggacgggaacggtcagatcgtggtcagcggtggtaatgatgcaaaggttacttccttatatgattcgagctcggactcttggattccgggcccggatatgcaggtcgcgcgtgggtatcaatcaagtgcgactatgagtgatgggcgcgtatttacgattggcggcagttacagtggcggtcaagctgagaagaacggggaggtttactccccgagctcgaaaacgtggacttcgctgccgaatgcaaaagttaaccccatgctgaccgccgataaacggggtctgtaccgtagcgataatcatgcttggctgtttgggtggaaaaagggtagcgtcttccaagcaggtccaagtactgccatgaactggtattatacatctgggtcgggggacgttaagagtgcagggaagcgtcaatcagaccgcggagtagccccagacgcgatgtgcggtaatgccgtaatgtacgacgcagtcaaaggcaaaattttgactttcgggggctcgcccgattatgaggagtcagatgcgactacaaatgcccatattatcacgctgggcgagcctggcacgagtccgaatacggtatttgcgagtaatgggttaaatttcgctcgtacctttcatacctcggtggtccttccggacgggagtgtattcatcacaggaggccagcagcgcgcggttccactggaagatagcacacccgtatttactccagagatctacgttcccgaacaagatactttttacaagcaaaacccgaatagtatcgttcgtgcctatcattcgatcagcttgttgctgccggacggacgtgttttcaatggtggcggtggcttatgcggcgattgtgagacgaaccactttgatgcgcaaatctttacgccgaattatctttacgatagcaacgggaacttagccactcgccctaaaatcacccgtacctcaacccagtcagtcaaggtcggcgggtggatcaccatttggactgacatgcaaatcaccgccgcaagtttaattcgctacggaactgctactcacacggtgaacaccgatcagcgacgcatcggcttgacgttaacgaacaacggaggtaattcgtacagctttcaagttccgtcggacagcggggttgctcttccgggatactggatgttgttcgttatgaattccgctggtgtaccctccgttgcgtcgacgattaatgttacccagggccaaactggccaccatcaccatcaccattag

SEQ ID NO: 314 - protein, 650 aa, Artificial Sequence
  Engineered variant of Galactose Oxidase from Fusarium graminearum
MASAPIGVAIPRNNWAVTCDSAQDGNECIKAIDGNKDTFWHTQYGVNGDPKPPHTITIDMKTVQNVNGLSVLPRQDGNQNGWIGRHEVYLSSDGVNWGSPVASGSWFADSTTKYSNFETRPARYVRLVAITEANGQPWTSIAEINVFQASSYTAPQPELGRWGPTIDLPIVPSAAAIEPTSGRVLMWSSYRNDAFRDSPGGITLTSSWDPSTGIVSDRTSTVTGHDMFCPGISMDGNGQIVVSGGNDAKVTSLYDSSSDSWIPGPDMQVARGYQSSATMSDGRVFTIGGSYSGGQAEKNGEVYSPSSKTWTSLPNAKVNPMLTADKRGLYRSDNHAWLFGWKKGSVFQAGPSTAMNWYYTSGSGDVKSAGKRQSDRGVAPDAMCGNAVMYDAVKGKILTFGGSPDYEESDATTNAHIITLGEPGTSPNTVFASNGLNFARTFHTSVVLPDGSVFITGGQQRAVPLEDSTPVFTPEIYVPEQDTFYKQNPNSIVRAYHSISLLLPDGRVFNGGGGLCGDCETNHFDAQIFTPNYLYDSNGNLATRPKITRTSTQSVKVGGWITIWTDMQITAASLIRYGTATHTVNTDQRRIGLTLTNNGGNSYSFQVPSDSGVALPGYWMLFVMNSAGVPSVASTINVTQGQTGHHHHHH

SEQ ID NO: 315 - DNA, 1953 bp, Artificial Sequence
  Engineered variant of Galactose Oxidase from Fusarium graminearum
atggcatcagcaccgatcggggtagccatcccgcgcaacaactgggccgttacatgcgattccgcccaggacgggaatgaaggtattaaggcaattgacggtaataaagacacgttttggcacactcaatatggtgtgaacggagatcccaaaccgccgcacaccatcacgatcgatatgaaaacagtacaaaacgtgaatggcctttctgtactgccacgtcaggatggcaatcagaatggatggatcggacgtcacgaggtgtatttaagttctgatggggtgaattggggatcgcctgtagcgtctgggtcctggtttgccgattccaccacaaagtactctaattttgagacacgtccggcccgttacgtgcgccttgtcgccattaccgaagccaatgggcaaccgtggacttcaattgccgagattaacgtatttcaggcgtctagttacactgccccgcagccggagttggggcgctggggcccgacaatcgatcttcccattgtgccatcggccgccgcaatcgagccaacgagcggtcgtgtcttgatgtggagctcttatcgtaacgatgcgtttcgtgactctcctggcggtattacactgacgagctcatgggaccctagcactggaattgtatccgatcgcactagtaccgttaccgggcacgacatgttttgccccggtatctcgatggacgggaacggtatgatcgtggtcagcggtggtaatgatgcaaaggttacttccttatatgattcgagctcggactcttggattccgggcccggatatgcaggtcgcgcgtgggtataactcaagtgcgactatgagtgatgggcgcgtatttacgattggcggcagtttcagtggcggtcaagctgagaagaacggggaggtttactccccgagctcgaaaacgtggacttcgctgccgaatgcaaaagttaaccccatgctgaccgccgataaacggggtctgtaccgtagcgataatcatgcttggctgtttgggtggaaaaagggtagcgtcttccaagcaggtccaagtactgccatgaactggtattatacatctgggtcgggggacgttaagagtgcagggaagcgtcaatcagaccgcggagtagccccagacgcgatgtgcggtaatgccgtaatgtacgacgcagtcaaaggcaaaattttgactttcgggggctcgcccgattatgaggattcagatgcgactacaaatgcccatattatcacgctgggcgagcctggcacgagtccgaatacggtatttgcgagtaatgggttaaatttcgctcgtacctttcatacctcggtggtccttccggacgggagtgtattcatcacaggaggccagcagcgcgcggttccactggaagatagcacacccgtatttactccagagatctacgttcccgaacaagatactttttacaagcaaaacccgaatagtatcgttcgtgcctatcattcgatcagcttgttgctgccggacggacgtgttttcaatggtggcggtggcttatgcggcgattgtgagacgaaccactttgatgcgcaaatctttacgccgaattatctttacgatagcaacgggaacttagccactcgccctaaaatcacccgtacctcaacccagtcagtcaaggtcggcgggtggatcaccatttggactgacatgcaaatcaccgccgcaagtttaattcgctacggaactgctactcacacggtgaacaccgatcagcgacgcatcggcttgacgttaacgaacaacggaggtaattcgtacagctttcaagttccgtcggacagcggggttgctcttccgggatactggatgttgttcgttatgaattccgctggtgtaccctccgttgcgtcgacgattaatgttacccagggccaaactggccaccatcaccatcaccattag

SEQ ID NO: 316 - protein, 650 aa, Artificial Sequence
  Engineered variant of Galactose Oxidase from Fusarium graminearum
MASAPIGVAIPRNNWAVTCDSAQDGNEGIKAIDGNKDTFWHTQYGVNGDPKPPHTITIDMKTVQNVNGLSVLPRQDGNQNGWIGRHEVYLSSDGVNWGSPVASGSWFADSTTKYSNFETRPARYVRLVAITEANGQPWTSIAEINVFQASSYTAPQPELGRWGPTIDLPIVPSAAAIEPTSGRVLMWSSYRNDAFRDSPGGITLTSSWDPSTGIVSDRTSTVTGHDMFCPGISMDGNGMIVVSGGNDAKVTSLYDSSSDSWIPGPDMQVARGYNSSATMSDGRVFTIGGSFSGGQAEKNGEVYSPSSKTWTSLPNAKVNPMLTADKRGLYRSDNHAWLFGWKKGSVFQAGPSTAMNWYYTSGSGDVKSAGKRQSDRGVAPDAMCGNAVMYDAVKGKILTFGGSPDYEDSDATTNAHIITLGEPGTSPNTVFASNGLNFARTFHTSVVLPDGSVFITGGQQRAVPLEDSTPVFTPEIYVPEQDTFYKQNPNSIVRAYHSISLLLPDGRVFNGGGGLCGDCETNHFDAQIFTPNYLYDSNGNLATRPKITRTSTQSVKVGGWITIWTDMQITAASLIRYGTATHTVNTDQRRIGLTLTNNGGNSYSFQVPSDSGVALPGYWMLFVMNSAGVPSVASTINVTQGQTGHHHHHH

SEQ ID NO: 317 - DNA, 1953 bp, Artificial Sequence
  Engineered variant of Galactose Oxidase from Fusarium graminearum
atggcatcagcaccgatcggggtagccatcccgcgcaacaactgggccgttacatgcgattccgcccaggacgggaatgaatgtattaaggcaattgacggtaataaagacacgttttggcacactcaatatggtgtgaacggagatcccaaaccgccgcacaccatcacgatcgatatgaaaacagtacaaaacgtgaatggcctttctgtactgccacgtcaggatggcaatcagaatggatggatcggacgtcacgaggtgtatttaagttctgatggggtgaattggggatcgcctgtagcgtctgggtcctggtttgccgattccaccacaaagtactctaattttgagacacgtccggcccgttacgtgcgccttgtcgccattaccgaagccaatgggcaaccgtggacttcaattgccgagattaacgtatttcaggcgtctagttacactgccccgcagccggagttggggcgctggggcccgacaatcgatcttcccattgtgccatcggccgccgcaatcgagccaacgagcggtcgtgtcttgatgtggagctcttatcgtaacgatgcgtttcgtgactctcctggcggtattacactgacgagctcatgggaccctagcactggaattgtatccgatcgcactagtaccgttaccgggcacgacatgttttgccccggtatctcgatggacgggaacggtatgatcgtggtcagcggtggtaatgatgcaaaggttacttccttatatgattcgagctcggactcttggattccgggcccggatatgcaggtcgcgcgtgggtataactcaagtgcgactatgagtgatgggcgcgtatttacgattggcggcagttacagtggcggtcaagctgagaagaacggggaggtttactccccgagctcgaaaacgtggacttcgctgccgaatgcaaaagttaaccccatgctgaccgccgataaacggggtctgtaccgtagcgataatcatgcttggctgtttgggtggaaaaagggtagcgtcttccaagcaggtccaagtactgccatgaactggtattttacatctgggtcgggggacgttaagagtgcagggaagcgtcaatcagaccgcggagtagccccagacgcgatgtgcggtaatgccgtaatgtacgacgcagtcaaaggcaaaattttgactttcgggggctcgcccgattatgaggaatcagatgcgactacaaatgcccatattatcacgctgggcgagcctggcacgagtccgaatacggtatttgcgagtaatgggttaaatttcgctcgtacctttcatacctcggtggtccttccggacgggagtgtattcatcacaggaggccagcagcgcgcggttccactggaagatagcacacccgtatttactccagagatctacgttcccgaacaagatactttttacaagcaaaacccgaatagtatcgttcgtgcctatcattcgatcagcttgttgctgccggacggacgtgttttcaatggtggccgtggcttatgcggcgattgtgagacgaaccactttgatgcgcaaatctttacgccgaattatctttacgatagcaacgggaacttagccactcgccctaaaatcacccgtacctcaacccagtcagtcaaggtcggcgggtggatcaccatttggactgacatgcaaatcaccgccgcaagtttaattcgctacggaactgctactcacacggtgaacaccgatcagcgacgcatcggcttgacgttaacgaacaacggaggtaattcgtacagctttcaagttccgtcggacagcggggttgctcttccgggatactggatgttgttcgttatgaattccgctggtgtaccctccgttgcgtcgacgattaatgttacccagggccaaactggccaccatcaccatcaccattag

SEQ ID NO: 318 - protein, 650 aa, Artificial Sequence
  Engineered variant of Galactose Oxidase from Fusarium graminearum
MASAPIGVAIPRNNWAVTCDSAQDGNECIKAIDGNKDTFWHTQYGVNGDPKPPHTITIDMKTVQNVNGLSVLPRQDGNQNGWIGRHEVYLSSDGVNWGSPVASGSWFADSTTKYSNFETRPARYVRLVAITEANGQPWTSIAEINVFQASSYTAPQPELGRWGPTIDLPIVPSAAAIEPTSGRVLMWSSYRNDAFRDSPGGITLTSSWDPSTGIVSDRTSTVTGHDMFCPGISMDGNGMIVVSGGNDAKVTSLYDSSSDSWIPGPDMQVARGYNSSATMSDGRVFTIGGSYSGGQAEKNGEVYSPSSKTWTSLPNAKVNPMLTADKRGLYRSDNHAWLFGWKKGSVFQAGPSTAMNWYFTSGSGDVKSAGKRQSDRGVAPDAMCGNAVMYDAVKGKILTFGGSPDYEESDATTNAHIITLGEPGTSPNTVFASNGLNFARTFHTSVVLPDGSVFITGGQQRAVPLEDSTPVFTPEIYVPEQDTFYKQNPNSIVRAYHSISLLLPDGRVFNGGRGLCGDCETNHFDAQIFTPNYLYDSNGNLATRPKITRTSTQSVKVGGWITIWTDMQITAASLIRYGTATHTVNTDQRRIGLTLTNNGGNSYSFQVPSDSGVALPGYWMLFVMNSAGVPSVASTINVTQGQTGHHHHHH

SEQ ID NO: 319 - DNA, 1953 bp, Artificial Sequence
  Engineered variant of Galactose Oxidase from Fusarium graminearum
atggcatcagcaccgatcggggtagccatcccgcgcaacaactgggccgttacatgcgattccgcccaggacgggaatgaatgtattaaggcaattgacggtaataaagacacgttttggcacactcaatatggtgtgaacggagatcccaaaccgccgcacaccatcacgatcgatatgaaaacagtacaaaacgtgaatggcctttctgtactgccacgtcaggatggcaatcagaatggatggatcggacgtcacgaggtgtatttaagttctgatggggtgaattggggatcgcctgtagcgtctgggtcctggtttgccgattccaccacaaagtactctaattttgagacacgtccggcccgttacgtgcgccttgtcgccattaccgaagccaatgggcaaccgtggacttcaattgccgagattaacgtatttcaggcgtctagttacactgccccgcagccggagttggggcgctggggcccgacaatcgatcttcccattgtgccatcggccgccgcaatcgagccaacgagcggtcgtgtcttgatgtggagctcttatcgtaacgatgcgtttcgtgactctcctggcggtattacactgacgagctcatgggaccctagcactggaattgtatccgatcgcactagtaccgttaccgggcacgacatgttttgccccggtatctcgatggacgggaacggtatgatcgtggtcagcggtggtaatgatgcaaaggttacttccttatatgattcgagctcggactcttggattccgggcccggatatgcaggtcgcgcgtgggtatcagtcaagtgcgactatgagtgatgggcgcgtatttacgattggcggcagtttcagtggcggtcaagctgagaagaacggggaggtttactccccgagctcgaaaacgtggacttcgctgccgaatgcaaaagttaaccccatgctgaccgccgataaacggggtctgtaccgtagcgataatcatgcttggctgtttgggtggaaaaagggtagcgtcttccaagcaggtccaagtactgccatgaactggtattatacatctgggtcgggggacgttaagagtgcagggaagcgtcaatcagaccgcggagtagccccagacgcgatgtgcggtaatgccgtaatgtacgacgcagtcaaaggcaaaattttgactttcgggggctcgcccgattatgaggattcagatgcgactacaaatgcccatattatcacgctgggcgagcctggcacgagtccgaatacggtatttgcgagtaatgggttaaatttcgctcgtacctttcatacctcggtggtccttccggacgggagtgtattcatcacaggaggccagcagcgcgcggttccactggaagatagcacacccgtatttactccagagatctacgttcccgaacaagatactttttacaagcaaaacccgaatagtatcgttcgtgcctatcattcgatcagcttgttgctgccggacggacgtgttttcaatggtggcggtggcttatgcggcgattgtgagacgaacccttttgatgcgcaaatctttacgccgaattatctttacgatagcaacgggaacttagccactcgccctaaaatcacccgtacctcaacccagtcagtcaaggtcggcgggtggatcaccatttggactgacatgcaaatcaccgccgcaagtttaattcgctacggaactgctactcacacggtgaacaccgatcagcgacgcatcggcttgacgttaacgaacaacggaggtaattcgtacagctttcaagttccgtcggacagcggggttgctcttccgggatactggatgttgttcgttatgaattccgctggtgtaccctccgttgcgtcgacgattaatgttacccagggccaaactggccaccatcaccatcaccattag

SEQ ID NO: 320 - protein, 650 aa, Artificial Sequence
  Engineered variant of Galactose Oxidase from Fusarium graminearum
MASAPIGVAIPRNNWAVTCDSAQDGNECIKAIDGNKDTFWHTQYGVNGDPKPPHTITIDMKTVQNVNGLSVLPRQDGNQNGWIGRHEVYLSSDGVNWGSPVASGSWFADSTTKYSNFETRPARYVRLVAITEANGQPWTSIAEINVFQASSYTAPQPELGRWGPTIDLPIVPSAAAIEPTSGRVLMWSSYRNDAFRDSPGGITLTSSWDPSTGIVSDRTSTVTGHDMFCPGISMDGNGMIVVSGGNDAKVTSLYDSSSDSWIPGPDMQVARGYQSSATMSDGRVFTIGGSFSGGQAEKNGEVYSPSSKTWTSLPNAKVNPMLTADKRGLYRSDNHAWLFGWKKGSVFQAGPSTAMNWYYTSGSGDVKSAGKRQSDRGVAPDAMCGNAVMYDAVKGKILTFGGSPDYEDSDATTNAHIITLGEPGTSPNTVFASNGLNFARTFHTSVVLPDGSVFITGGQQRAVPLEDSTPVFTPEIYVPEQDTFYKQNPNSIVRAYHSISLLLPDGRVFNGGGGLCGDCETNPFDAQIFTPNYLYDSNGNLATRPKITRTSTQSVKVGGWITIWTDMQITAASLIRYGTATHTVNTDQRRIGLTLTNNGGNSYSFQVPSDSGVALPGYWMLFVMNSAGVPSVASTINVTQGQTGHHHHHH

SEQ ID NO: 321 - DNA, 1953 bp, Artificial Sequence
  Engineered variant of Galactose Oxidase from Fusarium graminearum
atggcatcagcaccgatcggggtagccatcccgcgcaacaactgggccgttacatgcgattccgcccaggacgggaatgaaggtattaaggcaattgacggtaataaagacacgttttggcacactcaatatggtgtgaacggagatcccaaaccgccgcacaccatcacgatcgatatgaaaacagtacaaaacgtgaatggcctttctgtactgccacgtcaggatggcaatcagaatggatggatcggacgtcacgaggtgtatttaagttctgatggggtgaattggggatcgcctgtagcgtctgggtcctggtttgccgattccaccacaaagtactctaattttgagacacgtccggcccgttacgtgcgccttgtcgccattaccgaagccaatgggcaaccgtggacttcaattgccgagattaacgtatttcaggcgtctagttacactgccccgcagccggagttggggcgctggggcccgacaatcgatcttcccattgtgccatcggccgccgcaatcgagccaacgagcggtcgtgtcttgatgtggagctcttatcgtaacgatgcgtttcgtgactctcctggcggtattacactgacgagctcatgggaccctagcactggaattgtatccgatcgcactagtaccgttaccgggcacgacatgttttgccccggtatctcgatggacgggaacggtatgatcgtggtcagcggtggtaatgatgcaaaggttacttccttatatgattcgagctcggactcttggattccgggcccggatatgcaggtcgcgcgtgggtatcaatcaagtgcgactatgagtgatgggcgcgtatttacgattggcggcagttttagtggcggtcaagctgagaagaacggggaggtttactccccgagctcgaaaacgtggacttcgctgccgaatgcaaaagttaaccccatgctgaccgccgataaacggggtctgtaccgtagcgataatcatgcttggctgtttgggtggaaaaagggtagcgtcttccaagcaggtccaagtactgccatgaactggtattatacatctgggtcgggggacgttaagagtgcagggaagcgtcaatcagaccgcggagtagccccagacgcgatgtgcggtaatgccgtaatgtacgacgcagtcaaaggcaaaattttgactttcgggggctcgcccgattatgaggaatcagatgcgactacaaatgcccatattatcacgctgggcgagcctggcacgagtccgaatacggtatttgcgagtaatgggttaaatttcgctcgtacctttcatacctcggtggtccttccggacgggagtgtattcatcacaggaggccagcagcgcgcggttccactggaagatagcacacccgtatttactccagagatctacgttcccgaacaagatactttttacaagcaaaacccgaatagtatcgttcgtgcctatcattcgatcagcttgttgctgccggacggacgtgttttcaatggtggcggtggcttatgcggcgattgtgagacgaaccactttgatgcgcaaatctttacgccgaattatctttacgatagcaacgggaacttagccactcgccctaaaatcacccgtacctcaacccagtcagtcaaggtcggcgggtggatcaccatttggactgacatgcaaatcaccgccgcaagtttaattcgctacggaactgctactcacacggtgaacaccgatcagcgacgcatcggcttgacgttaacgaacaacggaggtaattcgtacagctttcaagttccgtcggacagcggggttgctcttccgggatactggatgttgttcgttatgaattccgctggtgtaccctccgttgcgtcgacgattaatgttacccagggccaaactggccaccatcaccatcaccattag

SEQ ID NO: 322 - protein, 650 aa, Artificial Sequence
  Engineered variant of Galactose Oxidase from Fusarium graminearum
MASAPIGVAIPRNNWAVTCDSAQDGNEGIKAIDGNKDTFWHTQYGVNGDPKPPHTITIDMKTVQNVNGLSVLPRQDGNQNGWIGRHEVYLSSDGVNWGSPVASGSWFADSTTKYSNFETRPARYVRLVAITEANGQPWTSIAEINVFQASSYTAPQPELGRWGPTIDLPIVPSAAAIEPTSGRVLMWSSYRNDAFRDSPGGITLTSSWDPSTGIVSDRTSTVTGHDMFCPGISMDGNGMIVVSGGNDAKVTSLYDSSSDSWIPGPDMQVARGYQSSATMSDGRVFTIGGSFSGGQAEKNGEVYSPSSKTWTSLPNAKVNPMLTADKRGLYRSDNHAWLFGWKKGSVFQAGPSTAMNWYYTSGSGDVKSAGKRQSDRGVAPDAMCGNAVMYDAVKGKILTFGGSPDYEESDATTNAHIITLGEPGTSPNTVFASNGLNFARTFHTSVVLPDGSVFITGGQQRAVPLEDSTPVFTPEIYVPEQDTFYKQNPNSIVRAYHSISLLLPDGRVFNGGGGLCGDCETNHFDAQIFTPNYLYDSNGNLATRPKITRTSTQSVKVGGWITIWTDMQITAASLIRYGTATHTVNTDQRRIGLTLTNNGGNSYSFQVPSDSGVALPGYWMLFVMNSAGVPSVASTINVTQGQTGHHHHHH

SEQ ID NO: 323 - DNA, 1953 bp, Artificial Sequence
  Engineered variant of Galactose Oxidase from Fusarium graminearum
atggcatcagcaccgatcggggtagccatcccgcgcaacaactgggccgttacatgcgattccgcccaggacgggaatgaatgtattaaggcaattgacggtaataaagacacgttttggcacactcaatatggtgtgaacggagatcccaaaccgccgcacaccatcacgatcgatatgaaaacagtacaaaacgtgaatggcctttctgtactgccacgtcaggatggcaatcagaatggatggatcggacgtcacgaggtgtatttaagttctgatggggtgaattggggatcgcctgtagcgtctgggtcctggtttgccgattccaccacaaagtactctaattttgagacacgtccggcccgttacgtgcgccttgtcgccattaccgaagccaatgggcaaccgtggacttcaattgccgagattaacgtatttcaggcgtctagttacactgccccgcagccggagttggggcgctggggcccgacaatcgatcttcccattgtgccatcggccgccgcaatcgagccaacgagcggtcgtgtcttgatgtggagctcttatcgtaacgatgcgtttcgtgactctcctggcggtattacactgacgagctcatgggaccctagcactggaattgtatccgatcgcactagtaccgttaccgggcacgacatgttttgccccggtatctcgatggacgggaacggtctgatcgtggtcagcggtggtaatgatgcaaaggttacttccttatatgattcgagctcggactcttggattccgggcccggatatgcaggtcgcgcgtgggtatcactcaagtgcgactatgagtgatgggcgcgtatttacgattggcggcagttacagtggcggtcaagctgagaagaacggggaggtttactccccgagctcgaaaacgtggacttcgctgccgaatgcaaaagttaaccccatgctgaccgccgataaacggggtctgtaccgtagcgataatcatgcttggctgtttgggtggaaaaagggtagcgtcttccaagcaggtccaagtactgccatgaactggtattatacatctgggtcgggggacgttaagagtgcagggaagcgtcaatcagaccgcggagtagccccagacgcgatgtgcggtaatgccgtaatgtacgacgcagtcaaaggcaaaattttgactttcgggggctcgcccgattatgaggattcagatgcgactacaaatgcccatattatcacgctgggcgagcctggcacgagtccgaatacggtatttgcgagtaatgggttaaatttcgctcgtacctttcatacctcggtggtccttccggacgggagtgtattcatcacaggaggccagcagcgcgcggttccactggaagatagcacacccgtatttactccagagatctacgttcccgaacaagatactttttacaagcaaaacccgaatagtatcgttcgtgcctatcattcgatcagcttgttgctgccggacggacgtgttttcaatggtggcggtggcttatgcggcgattgtgagacgaaccactttgatgcgcaaatctttacgccgaattatctttacgatagcaacgggaacttagccactcgccctaaaatcacccgtacctcaacccagtcagtcaaggtcggcgggtggatcaccatttggactgacatgcaaatcaccgccgcaagtttaattcgctacggaactgctactcacacggtgaacaccgatcagcgacgcatcggcttgacgttaacgaacaacggaggtaattcgtacagctttcaagttccgtcggacagcggggttgctcttccgggatactggatgttgttcgttatgaattccgctggtgtaccctccgttgcgtcgacgattaatgttacccagggccaaactggccaccatcaccatcaccattag

SEQ ID NO: 324 - protein, 650 aa, Artificial Sequence
  Engineered variant of Galactose Oxidase from Fusarium graminearum
MASAPIGVAIPRNNWAVTCDSAQDGNECIKAIDGNKDTFWHTQYGVNGDPKPPHTITIDMKTVQNVNGLSVLPRQDGNQNGWIGRHEVYLSSDGVNWGSPVASGSWFADSTTKYSNFETRPARYVRLVAITEANGQPWTSIAEINVFQASSYTAPQPELGRWGPTIDLPIVPSAAAIEPTSGRVLMWSSYRNDAFRDSPGGITLTSSWDPSTGIVSDRTSTVTGHDMFCPGISMDGNGLIVVSGGNDAKVTSLYDSSSDSWIPGPDMQVARGYHSSATMSDGRVFTIGGSYSGGQAEKNGEVYSPSSKTWTSLPNAKVNPMLTADKRGLYRSDNHAWLFGWKKGSVFQAGPSTAMNWYYTSGSGDVKSAGKRQSDRGVAPDAMCGNAVMYDAVKGKILTFGGSPDYEDSDATTNAHIITLGEPGTSPNTVFASNGLNFARTFHTSVVLPDGSVFITGGQQRAVPLEDSTPVFTPEIYVPEQDTFYKQNPNSIVRAYHSISLLLPDGRVFNGGGGLCGDCETNHFDAQIFTPNYLYDSNGNLATRPKITRTSTQSVKVGGWITIWTDMQITAASLIRYGTATHTVNTDQRRIGLTLTNNGGNSYSFQVPSDSGVALPGYWMLFVMNSAGVPSVASTINVTQGQTGHHHHHH

SEQ ID NO: 325 - DNA, 1953 bp, Artificial Sequence
  Engineered variant of Galactose Oxidase from Fusarium graminearum
atggcatcagcaccgatcggggtagccatcccgcgcaacaactgggccgttacatgcgattccgcccaggacgggaatgaatgcattaaggcaattgacggtaataaagacacgttttggcacactcaatatggtgtgaacggagatcccaaaccgccgcacacgatcacgatcgatatgaaaacagtacaaaacgtgaatggcctttctgtactgccacgtcaggatggcaatcagaatggatggatcggacgtcacgaggtgtatttaagttctgatggggtgaattggggatcgcctgtagcgtctgggtcctggtttgccgattccaccacaaagtactctaattttgagacacgtccggcccgttacgtgcgccttgtcgccattaccgaagccaatgggcaaccgtggacttcaattgccgagattaacgtatttcaggcgtctagttacactgccccgcagccggagttggggcgctggggcccgacaatcgatcttcccattgtgccatcggccgccgcaatcgagccaacgagcggtcgtgtcttgatgtggagctcttatcgtaacgatgcgtttcgtgactctcctggcggtattacactgacgagctcatgggaccctagcactggaattgtatccgatcgcactagtaccgttaccgggcacgacatgttttgccccggtatctcgatggatgggaacggtatgatcgtggtcagcggtggtaatgatgcaaaggttacttccttatatgattcgagctcggactcttggattccgggcccggatatgcaggtcgcgcgtgggtatcaatcaagtgcgactatgagtgatgggcgcgtatttacgattggcggcagttttagtggcggtcaagctgagaagaacggggaggtttactccccgagctcgaaaacgtggacttcgctgccgaatgcaaaagttaaccccatgctgaccgccgataaacggggtctgtaccgtagcgataatcatgcttggctgtttgggtggaaaaagggtagcgtcttccaagcaggtccaagtactgccatgaactggtattatacatctgggtcgggggacgttaagagtgcagggaagcgtcaatcagaccgcggagtagccccagacgcgatgtgcggtaatgccgtaatgtacgacgcagtcaaaggcaaaattttgactttcgggggctcgcccgattatgaggattcagatgcgactacaaatgcccatattatcacgctgggcgagcctggcacgagtccgaatacggtatttgcgagtaatgggttaaatttcgctcgtacctttcatacctcggtggtccttccggacgggagtgtattcatcacaggaggccagcagcgcgcggttccactggaagatagcacacccgtatttactccagagatctacgttcccgaacaagatactttttacaagcaaaacccgaatagtatcgttcgtgcctatcattcgatcagcttgttgctgccggacggacgtgttttcaatggtggcggtggcttatgcggcgattgtgagacgaaccactttgatgcgcaaatctttacgccgaattatctttacgatagcaacgggaacttagccactcgccctaaaatcacccgtacctcaacccagtcagtcaaggtcggcgggtggatcaccatttggactgacatgcaaatcaccgccgcaagtttaattcgctacggaactgctactcacacggtgaacaccgatcagcgacgcatcggcttgacgttaacgaacaacggaggtaattcgtacagctttcaagttccgtcggacagcggggttgctcttccgggatactggatgttgttcgttatgaattccgctggtgtaccctccgttgcgtcgacgattaatgttacccagggccaaactggccaccatcaccatcaccattag

SEQ ID NO: 326 - protein, 650 aa, Artificial Sequence; identical to SEQ ID NO: 302
  Engineered variant of Galactose Oxidase from Fusarium graminearum

SEQ ID NO: 327 - DNA, 1953 bp, Artificial Sequence
  Engineered variant of Galactose Oxidase from Fusarium graminearum
atggcatcagcaccgatcggggtagccatcccgcgcaacaactgggccgttacatgcgattccgcccaggacgggaatgaatgcattaaggcaattgacggtaataaagacacgttttggcacactcaatatggtgtgaacggagatcccaaaccgccgcacacgatcacgatcgatatgaaaacagtacaaaacgtgaatggcctttctgtactgccacgtcaggatggcaatcagaatggatggatcggacgtcacgaggtgtatttaagttctgatggggtgaattggggatcgcctgtagcgtctgggtcctggtttgccgattccaccacaaagtactctaattttgagacacgtccggcccgttacgtgcgccttgtcgccattaccgaagccaatgggcaaccgtggacttcaattgccgagattaacgtatttcaggcgtctagttacactgccccgcagccggagttggggcgctggggcccgacaatcgatcttcccattgtgccatcggccgccgcaatcgagccaacgagcggtcgtgtcttgatgtggagctcttatcgtaacgatgcgtttcgtgactctcctggcggtattacactgacgagctcatgggaccctagcactggaattgtatccgatcgcactagtaccgttaccgggcacgacatgttttgccccggtatctcgatggatgggaacggtatgatcgtggtcagcggtggtaatgatgcaaaggttacttccttatatgattcgagctcggactcttggattccgggcccggatatgcaggtcgcgcgtgggtatcaatcaagtgcgactatgagtgatgggcgcgtatttacgattggcggcagttttagtggcggtcaagctgagaagaacggggaggtttactccccgagctcgaaaacgtggacttcgctgccgaatgcaaaagttaaccccatgctgaccgccgataaacggggtctgtaccgtagcgataatcatgcttggctgtttgggtggaaaaagggtagcgtcttccaagcaggtccaagtactgccatgaactggtattatacatctgggtcgggggacgttaagagtgcagggaagcgtcaatcagaccgcggagtagccccagacgcgatgtgcggtaatgccgtaatgtacgacgcagtcaaaggcaaaattttgactttcgggggctcgcccgattatgaggagtcagatgcgactacaaatgcccatattatcacgctgggcgagcctggcacgagtccgaatacggtatttgcgagtaatgggttaaatttcgctcgtacctttcatacctcggtggtccttccggacgggagtgtattcatcacaggaggccagcagcgcgcggttccactggaagatagcacacccgtatttactccagagatctacgttcccgaacaagatactttttacaagcaaaacccgaatagtatcgttcgtgcctatcattcgatcagcttgttgctgccggacggacgtgttttcaatggtggcggtggcttatgcggcgattgtgagacgaaccactttgatgcgcaaatctttacgccgaattatctttacgatagcaacgggaacttagccactcgccctaaaatcacccgtacctcaacccagtcagtcaaggtcggcgggtggatcaccatttggactgacatgcaaatcaccgccgcaagtttaattcgctacggaactgctactcacacggtgaacaccgatcagcgacgcatcggcttgacgttaacgaacaacggaggtaattcgtacagctttcaagttccgtcggacagcggggttgctcttccgggatactggatgttgttcgttatgaattccgctggtgtaccctccgttgcgtcgacgattaatgttacccagggccaaactggccaccatcaccatcaccattag

SEQ ID NO: 328 - protein, 650 aa, Artificial Sequence; identical to SEQ ID NO: 312
  Engineered variant of Galactose Oxidase from Fusarium graminearum

SEQ ID NO: 329 - DNA, 1953 bp, Artificial Sequence
  Engineered variant of Galactose Oxidase from Fusarium graminearum
atggcatcagcaccgatcggggtagccatcccgcgcaacaactgggccgttacatgcgattccgcccaggacgggaatgaaggcattaaggcaattgacggtaataaagacacgttttggcacactcaatatggtgtgaacggagatcccaaaccgccgcacacgatcacgatcgatatgaaaacagtacaaaacgtgaatggcctttctgtactgccacgtcaggatggcaatcagaatggatggatcggacgtcacgaggtgtatttaagttctgatggggtgaattggggatcgcctgtagcgtctgggtcctggtttgccgattccaccacaaagtactctaattttgagacacgtccggcccgttacgtgcgccttgtcgccattaccgaagccaatgggcaaccgtggacttcaattgccgagattaacgtatttcaggcgtctagttacactgccccgcagccggagttggggcgctggggcccgacaatcgatcttcccattgtgccatcggccgccgcaatcgagccaacgagcggtcgtgtcttgatgtggagctcttatcgtaacgatgcgtttcgtgactctcctggcggtattacactgacgagctcatgggaccctagcactggaattgtatccgatcgcactagtaccgttaccgggcacgacatgttttgccccggtatctcgatggatgggaacggtatgatcgtggtcagcggtggtaatgatgcaaaggttacttccttatatgattcgagctcggactcttggattccgggcccggatatgcaggtcgcgcgtgggtatcaatcaagtgcgactatgagtgatgggcgcgtatttacgattggcggcagttttagtggcggtcaagctgagaagaacggggaggtttactccccgagctcgaaaacgtggacttcgctgccgaatgcaaaagttaaccccatgctgaccgccgataaacggggtctgtaccgtagcgataatcatgcttggctgtttgggtggaaaaagggtagcgtcttccaagcaggtccaagtactgccatgaactggtattatacatctgggtcgggggacgttaagagtgcagggattcgtcaatcagaccgcggagtagccccagacgcgatgtgcggtaatgccgtaatgtacgacgcagtcaaaggcaaaattttgactttcgggggctcgcccgattatgaggattcagatgcgactacaaatgcccatattatcacgctgggcgagcctggcacgagtccgaatacggtatttgcgagtaatgggttaaatttcgctcgtacctttcatacctcggtggtccttccggacgggagtgtattcatcacaggaggccagcagcgcgcggttccactggaagatagcacacccgtatttactccagagatctacgttcccgaacaagatactttttacaagcaaaacccgaatagtatcgttcgtgcctatcattcgatcagcttgttgctgccggacggacgtgttttcaatggtggcggtggcttatgcggcgattgtgagacgaaccactttgatgcgcaaatctttacgccgaattatctttacgatagcaacgggaacttagccactcgccctaaaatcacccgtacctcaacccagtcagtcaaggtcggcgggtggatcaccatttggactgacatgcaaatcaccgccgcaagtttaattcgctacggaactgctactcacacggtgaacaccgatcagcgacgcatcggcttgacgttaacgaacaacggaggtaattcgtacagctttcaagttccgtcggacagcggggttgctcttccgggatactggatgttgttcgttatgaattccgctggtgtaccctccgttgcgtcgacgattaatgttacccagggccaaactggccaccatcaccatcaccattag

SEQ ID NO: 330 - protein, 650 aa, Artificial Sequence
  Engineered variant of Galactose Oxidase from Fusarium graminearum
MASAPIGVAIPRNNWAVTCDSAQDGNEGIKAIDGNKDTFWHTQYGVNGDPKPPHTITIDMKTVQNVNGLSVLPRQDGNQNGWIGRHEVYLSSDGVNWGSPVASGSWFADSTTKYSNFETRPARYVRLVAITEANGQPWTSIAEINVFQASSYTAPQPELGRWGPTIDLPIVPSAAAIEPTSGRVLMWSSYRNDAFRDSPGGITLTSSWDPSTGIVSDRTSTVTGHDMFCPGISMDGNGMIVVSGGNDAKVTSLYDSSSDSWIPGPDMQVARGYQSSATMSDGRVFTIGGSFSGGQAEKNGEVYSPSSKTWTSLPNAKVNPMLTADKRGLYRSDNHAWLFGWKKGSVFQAGPSTAMNWYYTSGSGDVKSAGIRQSDRGVAPDAMCGNAVMYDAVKGKILTFGGSPDYEDSDATTNAHIITLGEPGTSPNTVFASNGLNFARTFHTSVVLPDGSVFITGGQQRAVPLEDSTPVFTPEIYVPEQDTFYKQNPNSIVRAYHSISLLLPDGRVFNGGGGLCGDCETNHFDAQIFTPNYLYDSNGNLATRPKITRTSTQSVKVGGWITIWTDMQITAASLIRYGTATHTVNTDQRRIGLTLTNNGGNSYSFQVPSDSGVALPGYWMLFVMNSAGVPSVASTINVTQGQTGHHHHHH

SEQ ID NO: 331 - DNA, 1953 bp, Artificial Sequence
  Engineered variant of Galactose Oxidase from Fusarium graminearum
atggcatcagcaccgatcggggtagccatcccgcgcaacaactgggccgttacatgcgattccgcccaggacgggaatgaaggcattaaggcaattgacggtaataaagacacgttttggcacactcaatatggtgtgaacggagatcccaaaccgccgcacacgatcacgatcgatatgaaaacagtacaaaacgtgaatggcctttctgtactgccacgtcaggatggcaatcagaatggatggatcggacgtcacgaggtgtatttaagttctgatggggtgaattggggatcgcctgtagcgtctgggtcctggtttgccgattccaccacaaagtactctaattttgagacacgtccggcccgttacgtgcgccttgtcgccattaccgaagccaatgggcaaccgtggacttcaattgccgagattaacgtatttcaggcgtctagttacactgccccgcagccggagttggggcgctggggcccgacaatcgatcttcccattgtgccatcggccgccgcaatcgagccaacgagcggtcgtgtcttgatgtggagctcttatcgtaacgatgcgtttcgtgactctcctggcggtattacactgacgagctcatgggaccctagcactggaattgtatccgatcgcactagtaccgttaccgggcacgacatgttttgccccggtatctcgatggatgggaacggtatgatcgtggtcagcggtggtaatgatgcaaaggttacttccttatatgattcgagctcggactcttggattccgggcccggatatgcaggtcgcgcgtgggtatcaatcaagtgcgactatgagtgatgggcgcgtatttacgattggcggcagttttagtggcggtcaagctgagaagaacggggaggtttactccccgagctcgaaaacgtggacttcgctgccgaatgcaaaagttaaccccatgctgaccgccgataaacggggtctgtaccgtagcgataatcatgcttggctgtttgggtggaaaaagggtagcgtcttccaagcaggtccaagtactgccatgaactggtattatacatctgggtcgggggacgttaagagtgcagggaagcgtcaatcagaccgcggagtagccccagacgcgatgtgcggtaatgccgtaatgtacgacgcagtcaaaggcaaaattttgacttttgggggctcgcccgattatgaggaatcagatgcgactacaaatgcccatattatcacgctgggcgagcctggcacgagtccgaatacggtatttgcgagtaatgggttaaatttcgctcgtacctttcatacctcggtggtccttccggacgggagtgtattcatcacaggaggccagcagcgcgcggttccactggaagatagcacacccgtatttactccagagatctacgttcccgaacaagatactttttacaagcaaaacccgaatagtatcgttcgtgcctatcattcgatcagcttgttgctgccggacggacgtgttttcaatggtggcggtggcttatgcggcgattgtgagacgaaccactttgatgcgcaaatctttacgccgaattatctttacgatagcaacgggaacttagccactcgccctaaaatcacccgtacctcaacccagtcagtcaaggtcggcgggtggatcaccatttggactgacatgcaaatcaccgccgcaagtttaattcgctacggaactgctactcacacggtgaacaccgatcagcgacgcatcggcttgacgttaacgaacaacggaggtaattcgtacagctttcaagttccgtcggacagcggggttgctcttccgggatactggatgttgttcgttatgaattccgctggtgtaccctccgttgcgtcgacgattaatgttacccagggccaaactggccaccatcaccatcaccattag

SEQ ID NO: 332 - protein, 650 aa, Artificial Sequence; identical to SEQ ID NO: 322
  Engineered variant of Galactose Oxidase from Fusarium graminearum

SEQ ID NO: 333 - DNA, 1953 bp, Artificial Sequence
  Engineered variant of Galactose Oxidase from Fusarium graminearum
atggcatcagcaccgatcggggtagccatcccgcgcaacaactgggccgttacatgcgattccgcccaggacgggaatgaaggcattaaggcaattgacggtaataaagacacgttttggcacactcaatatggtgtgaacggagatcccaaaccgccgcacacgatcacgatcgatatgaaaacagtacaaaacgtgaatggcctttctgtactgccacgtcaggatggcaatcagaatggatggatcggacgtcacgaggtgtatttaagttctgatggggtgaattggggatcgcctgtagcgtctgggtcctggtttgccgattccaccacaaagtactctaattttgagacacgtccggcccgttacgtgcgccttgtcgccattaccgaagccaatgggcaaccgtggacttcaattgccgagattaacgtatttcaggcgtctagttacactgccccgcagccggagttggggcgctggggcccgacaatcgatcttcccattgtgccatcggccgccgcaatcgagccaacgagcggtcgtgtcttgatgtggagctcttatcgtaacgatgcgtttcgtgactctcctggcggtattacactgacgagctcatgggaccctagcactggaattgtatccgatcgcactagtaccgttaccgggcacgacatgttttgccccggtatctcgatggatgggaacggtcagatcgtggtcagcggtggtaatgatgcaaaggttacttccttatatgattcgagctcggactcttggattccgggcccggatatgcaggtcgcgcgtgggtatcaatcaagtgcgactatgagtgatgggcgcgtatttacgattggcggcagttttagtggcggtcaagctgagaagaacggggaggtttactccccgagctcgaaaacgtggacttcgctgccgaatgcaaaagttaaccccatgctgaccgccgataaacggggtctgtaccgtagcgataatcatgcttggctgtttgggtggaaaaagggtagcgtcttccaagcaggtccaagtactgccatgaactggtattatacatctgggtcgggggacgttaagagtgcagggattcgtcaatcagaccgcggagtagccccagacgcgatgtgcggtaatgccgtaatgtacgacgcagtcaaaggcaaaattttgactttcgggggctcgcccgattatgaggagtcagatgcgactacaaatgcccatattatcacgctgggcgagcctggcacgagtccgaatacggtatttgcgagtaatgggttaaatttcgctcgtacctttcatacctcggtggtccttccggacgggagtgtattcatcacaggaggccagcagcgcgcggttccactggaagatagcacacccgtatttactccagagatctacgttcccgaacaagatactttttacaagcaaaacccgaatagtatcgttcgtgcctatcattcgatcagcttgttgctgccggacggacgtgttttcaatggtggcggtggcttatgcggcgattgtgagacgaaccactttgatgcgcaaatctttacgccgaattatctttacgatagcaacgggaacttagccactcgccctaaaatcacccgtacctcaacccagtcggtcaaggtcggcgggtggatcaccatttggactgacatgcaaatcaccgccgcaagtttaattcgctacggaactgctactcacacggtgaacaccgatcagcgacgcatcggcttgacgttaacgaacaacggaggtaattcgtacagctttcaagttccgtcggacagcggggttgctcttccgggatactggatgttgttcgttatgaattccgctggtgtaccctccgttgcgtcgacgattaatgttacccagggccaaactggccaccatcaccatcaccattag

SEQ ID NO: 334 - protein, 650 aa, Artificial Sequence
  Engineered variant of Galactose Oxidase from Fusarium graminearum
MASAPIGVAIPRNNWAVTCDSAQDGNEGIKAIDGNKDTFWHTQYGVNGDPKPPHTITIDMKTVQNVNGLSVLPRQDGNQNGWIGRHEVYLSSDGVNWGSPVASGSWFADSTTKYSNFETRPARYVRLVAITEANGQPWTSIAEINVFQASSYTAPQPELGRWGPTIDLPIVPSAAAIEPTSGRVLMWSSYRNDAFRDSPGGITLTSSWDPSTGIVSDRTSTVTGHDMFCPGISMDGNGQIVVSGGNDAKVTSLYDSSSDSWIPGPDMQVARGYQSSATMSDGRVFTIGGSFSGGQAEKNGEVYSPSSKTWTSLPNAKVNPMLTADKRGLYRSDNHAWLFGWKKGSVFQAGPSTAMNWYYTSGSGDVKSAGIRQSDRGVAPDAMCGNAVMYDAVKGKILTFGGSPDYEESDATTNAHIITLGEPGTSPNTVFASNGLNFARTFHTSVVLPDGSVFITGGQQRAVPLEDSTPVFTPEIYVPEQDTFYKQNPNSIVRAYHSISLLLPDGRVFNGGGGLCGDCETNHFDAQIFTPNYLYDSNGNLATRPKITRTSTQSVKVGGWITIWTDMQITAASLIRYGTATHTVNTDQRRIGLTLTNNGGNSYSFQVPSDSGVALPGYWMLFVMNSAGVPSVASTINVTQGQTGHHHHHH

1. An engineered galactose oxidase comprising a polypeptide sequence having at least 85%, 86%, 87%, 88%, 89%, 90%, 91%, 92%, 93%, 94%, 95%, 96%, 97%, 98%, 99%, or more sequence identity to SEQ ID NO: 114, 4, 6, 38, 50, 226, and/or 262, or a functional fragment thereof, wherein said engineered galactose oxidase comprises at least one substitution or substitution set in said polypeptide sequence, and wherein the amino acid positions of said polypeptide sequence are numbered with reference to SEQ ID NO: 114, 4, 6, 38, 50, 226, and/or 262.

2. The engineered galactose oxidase of claim 1, wherein said polypeptide sequence has at least 85%, 86%, 87%, 88%, 89%, 90%, 91%, 92%, 93%, 94%, 95%, 96%, 97%, 98%, 99%, or more sequence identity to SEQ ID NO: 4, and wherein said engineered galactose oxidase comprises at least one substitution or substitution set at one or more positions in said polypeptide sequence selected from 196/158, 19/547/564, 47, 111, 196, 196/327, 196/408/462, 196/442, 196/442/462/583, 218, 292, 329, 407, 408, and 442, wherein the amino acid positions of said polypeptide sequence are numbered with reference to SEQ ID NO: 4.

3. The engineered galactose oxidase of claim 1, wherein said polypeptide sequence has at least 85%, 86%, 87%, 88%, 89%, 90%, 91%, 92%, 93%, 94%, 95%, 96%, 97%, 98%, 99%, or more sequence identity to SEQ ID NO: 6, and wherein said engineered galactose oxidase comprises at least one substitution or substitution set at one or more positions in said polypeptide sequence selected from 291, 407, 437, and 437/486, wherein the amino acid positions of said polypeptide sequence are numbered with reference to SEQ ID NO: 6.

4. The engineered galactose oxidase of claim 1, wherein said polypeptide sequence has at least 85%, 86%, 87%, 88%, 89%, 90%, 91%, 92%, 93%, 94%, 95%, 96%, 97%, 98%, 99%, or more sequence identity to SEQ ID NO: 38, and wherein said engineered galactose oxidase comprises at least one substitution or substitution set at one or more positions in said polypeptide sequence selected from 8/29/192/196/274/295, 8/63/224/274/291/295/296, 8/173/192/224/291/295/296, 8/274/291/295, 29/56/192/197/219/224/291/295/296, 43/192/274/291/296, 56/274/291, 56/274/295, 63/173/192/274, 63/192/295, 63/291/295, 111/462, 173/291, 197/220/426, 220/295, 220/375/426, 220/426/567, 243/274/291/295/637, 291, 291/408/437, 291/408/462, 291/429, 291/437, 291/437/462, 291/462, 297/462, 408/462, 437/462, 438, and 462, wherein the amino acid positions of said polypeptide sequence are numbered with reference to SEQ ID NO: 38.

5. The engineered galactose oxidase of claim 1, wherein said polypeptide sequence has at least 85%, 86%, 87%, 88%, 89%, 90%, 91%, 92%, 93%, 94%, 95%, 96%, 97%, 98%, 99%, or more sequence identity to SEQ ID NO: 50, and wherein said engineered galactose oxidase comprises at least one substitution or substitution set at one or more positions in said polypeptide sequence selected from 24/52/311/550, 46/158/192/217/297/556, 46/158/192/367/375/556, 46/192, 46/192/217/274/556, 46/192/274/304/367/637, 46/192/274/437/556, 46/192/304/367, 46/192/367/408, 46/192/367/556, 46/192/375/437, 46/274/367/375/437/637, 46/297/304/367/437/637, 158/192/217/556, 158/192/274/304, 158/192/274/437/556, 158/192/274/556, 158/192/304/408/556/637, 158/192/367/375, 158/192/367/556, 158/192/408/556, 158/637, 192, 192/217/295/297/367/556, 192/217/367/375/556, 192/217/556, 192/274, 192/274/304/426, 192/274/367/556, 192/274/367/637, 192/274/375, 192/295, 192/295/304, 192/295/367/375, 192/297/367/644, 192/297/437, 192/304, 192/304/365/437, 192/304/367, 192/304/637, 192/367, 192/367/375/556, 192/367/408/426/437/556, 192/437/556, 192/637, 217/304/437, 274/304/367/426/556, 304/426/556, 311/343/550, 367, 367/556, 375, 426, 437, and 550, wherein the amino acid positions of said polypeptide sequence are numbered with reference to SEQ ID NO: 50.

6. The engineered galactose oxidase of claim 1, wherein said polypeptide sequence has at least 85%, 86%, 87%, 88%, 89%, 90%, 91%, 92%, 93%, 94%, 95%, 96%, 97%, 98%, 99%, or more sequence identity to SEQ ID NO: 114, and wherein said engineered galactose oxidase comprises at least one substitution or substitution set at one or more positions in said polypeptide sequence selected from 161/564, 221, 263, 296, 308, 361, 373, 481/597, 518, 537, 553, 564, 570, and 596, wherein the amino acid positions of said polypeptide sequence are numbered with reference to SEQ ID NO: 114.

7. The engineered galactose oxidase of claim 1, wherein said polypeptide sequence has at least 85%, 86%, 87%, 88%, 89%, 90%, 91%, 92%, 93%, 94%, 95%, 96%, 97%, 98%, 99%, or more sequence identity to SEQ ID NO: 226, and wherein said engineered galactose oxidase comprises at least one substitution or substitution set at one or more positions in said polypeptide sequence selected from 24/47/382/408/570, 24/79/308/367, 24/250/308/596, 24/250/408/568/570, 24/308/309, 24/309/408/570, 24/367/408/596, 24/367/570, 24/596, 69, 250, 250/570, 309, 443, and 570, wherein the amino acid positions of said polypeptide sequence are numbered with reference to SEQ ID NO: 226.

8. The engineered galactose oxidase of claim 1, wherein said polypeptide sequence has at least 85%, 86%, 87%, 88%, 89%, 90%, 91%, 92%, 93%, 94%, 95%, 96%, 97%, 98%, 99%, or more sequence identity to SEQ ID NO: 262, and wherein said engineered galactose oxidase comprises at least one substitution or substitution set at one or more positions in said polypeptide sequence selected from 239/408, 318, 335/408, 338, and 408, wherein the amino acid positions of said polypeptide sequence are numbered with reference to SEQ ID NO: 262.

9. The engineered galactose oxidase of claim 1, wherein said polypeptide sequence has at least 85%, 86%, 87%, 88%, 89%, 90%, 91%, 92%, 93%, 94%, 95%, 96%, 97%, 98%, 99%, or more sequence identity to SEQ ID NO: 262, and wherein said engineered galactose oxidase comprises at least one substitution or substitution set at one or more positions in said polypeptide sequence selected from 335/408, 338, and 408, wherein the amino acid positions of said polypeptide sequence are numbered with reference to SEQ ID NO: 262.

10. The engineered galactose oxidase of claim 1, wherein said polypeptide sequence has at least 85%, 86%, 87%, 88%, 89%, 90%, 91%, 92%, 93%, 94%, 95%, 96%, 97%, 98%, 99%, or more sequence identity to SEQ ID NO: 262, and wherein said engineered galactose oxidase comprises at least one substitution or substitution set at one or more positions in said polypeptide sequence selected from 28/239, 28/239/274/408, 28/239/291/408, 28/239/371/408, 28/371, 239, 239/274/291/359/513, 239/274/291/408, 239/291/408, 239/408, 239/408/523, 291, 291/408, 318, 335/408, 338, and 408, wherein the amino acid positions of said polypeptide sequence are numbered with reference to SEQ ID NO: 262.

11. (canceled)

12. The engineered galactose oxidase of claim 1, wherein said engineered galactose oxidase comprises a polypeptide sequence that is at least 85%, 86%, 87%, 88%, 89%, 90%, 91%, 92%, 93%, 94%, 95%, 96%, 97%, 98%, 99% or more identical to the sequence of at least one engineered galactose oxidase variant set forth in SEQ ID NOS: 4, 6, 38, 50, 114, 226, and/or 262.

13. The engineered galactose oxidase of claim 1, wherein said engineered galactose oxidase is a variant engineered polypeptide set forth in SEQ ID NOS: 4, 6, 38, 50, 114, 226, and/or 262.

14. The engineered galactose oxidase of claim 1, wherein said engineered galactose oxidase comprises a polypeptide sequence that is at least 85%, 86%, 87%, 88%, 89%, 90%, 91%, 92%, 93%, 94%, 95%, 96%, 97%, 98%, 99% or more identical to the sequence of at least one engineered galactose oxidase variant set forth in the even numbered sequences of SEQ ID NOS: 4-334.

15. The engineered galactose oxidase of claim 1, wherein said engineered galactose oxidase comprises a polypeptide sequence forth in the even numbered sequences of SEQ ID NOS: 6-334.

16. The engineered galactose oxidase of claim 1, wherein said engineered galactose oxidase comprises at least one improved property compared to wild-type F. graminearium galactose oxidase.

17. The engineered galactose oxidase of claim 16, wherein said improved property comprises improved activity on a substrate.

18. (canceled)

19. The engineered galactose oxidase of claim 1, wherein said engineered galactose oxidase comprises a polypeptide with improved stereoselectivity compared to wild-type F. graminearium galactose oxidase.

20. The engineered galactose oxidase of claim 1, wherein said engineered galactose oxidase is purified.

21. A composition comprising at least one engineered galactose oxidase of claim 1.

22. A polynucleotide sequence encoding at least one engineered galactose oxidase of claim 1.

23. A polynucleotide sequence encoding at least one engineered galactose oxidase, wherein said polynucleotide sequence comprises at least 85%, 86%, 87%, 88%, 89%, 90%, 91%, 92%, 93%, 94%, 95%, 96%, 97%, 98%, 99%, or more sequence identity to SEQ ID NOS: 3, 5, 37, 49, 113, 225, and/or 261, wherein the polynucleotide sequence of said engineered galactose oxidase comprises at least one substitution at one or more positions.

24. (canceled)

25. The polynucleotide sequence of claim 22, wherein said polynucleotide sequence is operably linked to a control sequence.

26. The polynucleotide sequence of claim 22, wherein said polynucleotide sequence is codon optimized.

27. The polynucleotide sequence of claim 22, wherein said polynucleotide comprises an odd-numbered sequence of SEQ ID NOS: 5-333.

28. An expression vector comprising at least one polynucleotide sequence of claim 22.

29. A host cell comprising at least one expression vector of claim 28.

30. A host cell comprising at least one polynucleotide sequence of claim 22.

31. A method of producing an engineered galactose oxidase in a host cell, comprising culturing the host cell of claim 29, under suitable conditions, such that at least one engineered galactose oxidase is produced.

32. The method of claim 31, further comprising recovering at least one engineered galactose oxidase from the culture and/or host cell.

33. The method of claim 31, further comprising the step of purifying said at least one engineered galactose oxidase.
